(19) United States
(12) Patent Application Publication
(10) Pub. No.: US 2006/0233748 A1
(43) Pub. Date: Oct. 19, 2006

(54) Mimetics of interleukin-8 and methods of using them in the prevention, treatment, diagnosis, and ameliorization of symptoms of a disease

(76) Inventors: Ahmed Merzouk, Richmond (CA); Donald Wong, Vancouver (CA); Hassan Salari, Tsawwassen (CA)

Correspondence Address: PERKINS COIE LLP, P.O. BOX 2168, MENLO PARK, CA, 94026, US

(21) Appl. No.: 10/932,208

(22) Filed: Aug. 31, 2004

Related U.S. Application Data
(63) Continuation-in-part of application No. 10/243,795, filed on Sep. 13, 2002, now Pat. No. 7,091,310.

(51) Int. Cl. A61K 38/20

(52) U.S. Cl. 424/85.2

(57) ABSTRACT

The present invention teaches compositions and uses of mimetics of IL-8 in the diagnosis, prevention, treatment, and ameliorization of symptoms of a variety of diseases.

### CROSS-REFERENCE

[0001] This application is a continuation-in-part of prior U.S. patent application Ser. No. 10/243,795, filed Sep. 13, 2002, which is hereby incorporated herein in its entirety by reference.

### SEQUENCE LISTING

[0002] The instant application contains a “lengthy” sequence listing which has been submitted as a CD-R in lieu of a printed paper copy and is hereby incorporated by reference in its entirety. The CD-R versions, recorded on May 3, 2005, are labeled CRF, “Copy 1”, and “Copy 2”, respectively, and each contains only one identical 2.06 MB file (59296007.APP).

### BACKGROUND

[0003] 1. Field of the Invention

[0004] This invention relates to mimetics of the human chemokine interleukin-8.

[0005] 2. Description of the State-of-the-Art

[0006] Interleukin-8 (IL-8) is a chemokine that is responsible for the recruitment and activation of leukocytes and represents one of the several endogenous mediators of the acute inflammatory response. Until recently it was variously termed neutrophil-activating factor, monocyte-derived neutrophil chemotactic factor, neutrophil-activating peptide-1 and, of course, IL-8. The term “IL-8” has gained the widest acceptance and will be used herein.

[0007] The most abundant naturally occurring form of the IL-8 monomer is a 77 residue protein derived by processing of a 99-residue precursor. Other proteins with related sequences, including neutrophil-activating peptide-2 and GROα (with melanoma growth stimulatory activity) are IL-8 homologues, which have neutrophil-activating properties.

[0008] The IL-8 chemokine is a member of the chemokine super-family. Chemokines are divided into the following two functional classes: alpha (α) and beta (β). The members of each class share an organizing primary sequence motif. Members of the α class are potent chemoattractants, activators for leukocytes such as neutrophils, and have a C—X—C motif, which means that the first two cysteine residues are separated by an intervening residue. Members of the β class are potent chemoattractants, activators of monocytes, and have a C—C motif. Although these two families of chemokines have similar structures, they have a fairly low sequence homology (30-35%). The α class and β class are distinctive in their functions in that members of the α class cannot activate monocytes, and members of the β class have no effect on neutrophils. The IL-8 chemokines are members of the α class.

[0009] The in vitro effects of IL-8 on leukocytes such as neutrophils are similar to those of other chemotactic agonists such as C5a and fMet-Leu-Phe. The in vitro effects include induction of a transient rise in cytosolic free calcium; release of granules containing degradative enzymes such as elastase; burst of respiratory H₂O₂; change in neutrophil shape; and chemotaxis. The IL-8 chemokines appear to bind to at least one class of receptor sites on neutrophils with a frequency of approximately 64,000/cell and a K_{d} of 0.2 nM.

[0010] The three-dimensional structure of IL-8 is known by two-dimensional NMR and x-ray diffraction techniques. The IL-8 monomer has antiparallel β strands followed by a single overlying C-terminal α helix. Two disulfide bridges, between cysteine 7 and 34, and between cysteines 9 and 50 seem to stabilize the tertiary structure. Residues 1-6 and the loop residues 7-18 seem to have little defined secondary structure. The IL-8 is a noncovalent homodimer in solution and is stabilized primarily by interactions between the β strands of the two monomers. Examination of the three-dimensional structure indicates that following the cysteine at position 50, the residues form a type 1 β turn (at residues 51 through 55) followed by an amhipatic α helix (at residues 55 through 72) that transverses the β sheet. Some of the interactions are between the two subunits of the dimeric molecule.

[0011] The IL-8 chemokines have shown both anti-tumor and anti-infective therapeutic activity such as, for example, by reducing the regression of macroscopic tumors in a model of peritoneal carcinomatosis in the rat. In this model, IL-8 was shown to recruit polymorphonuclear leukocyte (PMN) to the challenge site but did not enhance PMN infiltration of the tumor or the cytotoxic activity of PMN. Regardless, it did have significant therapeutic activity, which may be secondary to PMN cytotoxicity and associated with other intermediate cells. It is suggested that lymphocytes could be involved since IL-8 has also demonstrated an ability to stimulate T-cell chemotaxis. See Lejeune, P., et al. Cancer Immunol. Immuno. 38:167-170(1994). Similarly, Interleukin-8 has shown therapeutic activity in non-neutropenic mice that received IL-8 shortly before challenge and at the site of infectious challenge with either P. aeuginosa, Klebsiella-phenumoniae, or Plasmodium-berghei. See Vogels, M. T., et al., Antimicrob-Agents-Chemother. 37:276-280(1993).

[0012] The IL-8 chemokine has been produced through chemical synthesis and recombinant DNA methods. See Clark-Lewis, et al., Biochemistry 30:3128-3135(1991); and Herbert, et al., J. Biol. Chem. 286:18989-18994(1991), respectively.

[0013] Chemokines and their receptors have received increasing attention in the last few years as a result of their participation in many pathological conditions such as inflammation and conditions associated with autoimmune response. Accordingly, one of skill in the art would benefit from the identification of compositions that comprise IL-8 mimetics that can be administered in the treatment of disease and amelioration of one or more symptoms of a disease.

### SUMMARY

[0014] Embodiments of the present invention generally encompass compositions comprising IL-8 mimetics. In some embodiments, the invention provides methods for treating a disease in a subject, and/or ameliorating one or more symptoms thereof, comprising administering to the subject a composition comprising an effective amount of an IL-8 mimetic.

[0015] The compositions generally include a peptide sequence Glu-Leu-Arg and some embodiments also include a linker. The compositions comprising the IL-8 mimetics can be administered in a variety of ways including, but not limited to, alone, as part of a combination therapy with other agents, and/or in a codrug form.

[0016] In some embodiments, the invention provides a method comprising contacting a cell with an IL-8 mimetic, wherein the contacting comprises combining an IL-8 mimetic with a cell in vitro. In other embodiments, an article of manufacture is provided and includes a composition comprising an IL-8 mimetic and instructions for administering the composition to a subject and monitoring the subject. The articles of manufacture also provide for the administration of a second agent as part of a combination treatment and/or as a codrug.

### BRIEF DESCRIPTION OF THE FIGURES

[0017] FIG. 1 shows the CXCR2 receptor binding of the IL-8 mimetics as competing ligands.

[0018] FIG. 2 shows the response of circulating neutrophil counts to the administration of varying doses of the IL-8 mimetic a161 (SEQ ID NO:1647) (“the test mimetic”) following one hour of treatment.

[0019] FIG. 3 describes the kinetics of the rise in circulating neutrophil counts in response to the administration of the test mimetic.

[0020] FIG. 4 shows the response of circulating haematopoietic progenitor/stem cells to the administration of varying doses of the test mimetic.

[0021] FIG. 5 shows the induction of a rise in haematopoietic progenitor/stem cells in response to the administration of the test mimetic.

### DETAILED DESCRIPTION OF THE INVENTION

[0022] The present application is a continuation-in-part of U.S. patent application Ser. No. 10/243,795, which is hereby incorporated herein in its entirety by reference. The present invention is directed toward the compositions of and uses for new mimetics of the human CXC chemokine IL-8. The chemokine mimetics of the present invention are referred to as “IL-8 mimetics.” For purposes of the present invention, the IL-8 mimetics can be analogs, homologs, prodrugs, codrugs, metabolites, congeners, variants, salts, and combinations thereof, of truncated forms of the human CXC chemokine IL-8.

[0023] The term “variant” refers to modifications to a peptide that allows the peptide to retain its binding properties, and such modifications include, but are not limited to, conservative substitutions in which one or more amino acids are substituted for other amino acids; deletion or addition of amino acids that have minimal influence on the binding properties or secondary structure; conjugation of a linker; post-translational modifications such as, for example, the addition of functional groups. Examples of such post-translational modifications can include, but are not limited to, the addition of modifying groups described below through processes such as, for example, glycosylation, acetylation, phosphorylation, modifications with fatty acids, formation of disulfide bonds between peptides, biotinylation, PEGylation, and combinations thereof. The term “conservatively modified variant” refers to a conservative amino acid substitution, which is an amino acid substituted by an amino acid of similar charge density, hydrophilicity/hydrophobicity, size, and/or configuration such as, for example, substituting valine for isoleucine. In comparison, a “non-conservatively modified variant” refers to a non-conservative amino acid substitution, which is an amino acid substituted by an amino acid of differing charge density, hydrophilicity/hydrophobicity, size, and/or configuration such as, for example, substituting valine for phenyalanine.

[0024] The IL-8 mimetics can be designed to include a wide variety of modifications to provide a diagnostic, therapeutic and/or prophylactic effect in the treatment of a disease or ameliorization of one or more symptoms of a disease in a subject. The term “subject” and “patient” are used interchangeably in the present invention and refer to an animal such as a mammal including, but not limited to, non-primates such as, for example, a cow, pig, horse, cat, dog, rat and mouse; and primates such as, for example, a monkey or a human.

[0025] The IL-8 mimetics can be used diagnostically, prophylactically, therapeutically, or to produce an ameliorative effect in a wide variety of diseases. The cells that are affected by the IL-8 mimetics include, but are not limited to, endothelial cells, leukocytes, red blood cells, megakaryocytes, stem cells, progenitor cells, and combinations thereof.

[0026] Endothelial cells are the main type of cell found in the inside lining of blood vessels, lymph vessels, and the heart. Leukocytes are white blood cells and are classified in two groups: granulocytes and agranulocytes. The granulocytes are neutrophils, eosinophils, and basophils, whereas the agranulocytes are lymphocytes and monocytes. The neutrophils represent 60-70% of all leukocytes, and lymphocytes represent 20-25% of all leukocytes. Red blood cells are the most common type of blood cell and are the principal means of delivering oxygen to body tissues through the blood. Red blood cells are also known as erythrocytes. Megakaryocytes are multinucleated cells that live in the bone marrow and generate blood platelets. Stem cells and progenitor cells are self-renewing cells. Stem cells have the ability to proliferate and differentiate into cell types of different tissues in vitro and in vivo, whereas progenitor cells are more limited. Many of these cell types are discussed in more detail herein in their respective sections.

[0027] The therapeutic and prophylactic effects of IL-8 mimetics can include, but are not limited to, one or more of the following: (a) an increase or decrease in the number of cells present at a specified location; (b) an increase or decrease in the ability of cells to migrate; (c) an increase or decrease in the response of cells to a stimulus; (d) an increase or decrease in the proliferation, growth, and/or differentiation of cells; (e) an inhibition or acceleration of apoptosis; (f) an ameliorization of one or more symptoms of disease; (g) an enhancement or inhibition of a cell function; and (h) an activation or inhibition of enzyme activity in cells.

[0028] An increase in the number of cells is “cell expansion,” and the IL-8 mimetics can cause this increase to occur in vivo or ex vivo. Accordingly, the IL-8 mimetics can be used to create mammal cells for diagnostic, prophylactic, therapeutic applications as well as commercial applications that include, but are not limited to, medicinal research and development of products such as, for example, vaccines.

[0029] A function or activity of a chemokine receptor can be controlled by contacting the receptor with an IL-8 mimetic to increase or decrease the probability of forming a complex between the receptor and a natural binding partner. The term “natural binding partner” includes, but is not limited to, G proteins, polypeptides, lipids, small molecules, or nucleic acids that bind to chemokine receptors in cells or in the extracellular environment. The term natural binding partner also includes substrates that can be acted upon by a chemokine receptor.

[0030] In some embodiments, an IL-8 mimetic can increase the probability of forming a complex between a chemokine receptor and a natural binding partner. In other embodiments, an IL-8 mimetic can decrease the probability of forming a complex between a chemokine receptor and a natural binding partner. In other embodiments, the concentration of an IL-8 mimetic can control the probability that a complex between a chemokine receptor and a natural binding partner will form. The term “complex” refers to a binding between at least two molecules. In one example, a signal transduction complex contains at least two protein molecules bound to one another. In another example, a receptor-protein tyrosine kinase, an adaptor protein GRB2, son of sevenless protein (Sos), and G proteins Ras and Ras can assemble to form a signal transduction complex in response to a mitogenic ligand. In another example, a chemokine mimetic can be bound to a chemokine receptor. In another example, a G protein can be bound to a chemokine receptor.

[0031] In some embodiments, an IL-8 mimetic activates the catalytic activity of a chemokine receptor. In other embodiments, an IL-8 mimetic inhibits the catalytic activity of a chemokine receptor. In other embodiments, the activation or inhibition of a chemokine receptor can be dependent on the concentration of an IL-8 mimetic. The term “activate” refers to increasing a cellular or extracellular function of a chemokine receptor.

[0032] Examples of diseases that can be affected by the IL-8 mimetics include, but are not limited to, autoimmune disorders, inflammatory disorders, organ transplant rejections, disorders associated with the treatment of cancer, cardiovascular disorders, hematological disorders, neurological disorders, and infectious disorders. In some embodiments, IL-8 mimetic compositions can be administered in a therapeutically or prophylactically effective amount that to increase the hemocrit, assist in mobilizing and recovering stem cells or progenitor cells, stimulate the production of blood cells, assist in vaccine production, or assist in gene therapy. The term “hemocrit” refers to the number red cells in a unit of blood. An average hemocrit ranges from about 4.2 to about 5.9 million red cells per microliter of blood.

[0033] Due to a traditional view that cells cannot be replaced, current treatments have focused on preventing cell death, but evidence has shown that some cells have the ability to regenerate. The recent derivation of human stem cells and progenitor cells has catapulted cell replacement therapy as a real alternative to current treatments such as, for example, treatments for neurodegenerative and other diseases. The term “stem cell” refers to a cell that can be self-renewing over a prolonged time period and can generate multiple phenotypes in response to an exogenous signal. The term “progenitor cell” refers to a cell that is more restricted in its differentiation capability and undergoes only limited self-renewal. In one example, an eosinophil progenitor must become an eosinophil—it can't become a neutrophil, although both are granulocytes.

[0034] Due to the belief that brain and spinal cord cells cannot be replaced, treatments of neurological disorders have, as described above, focused on preventing neuronal death. Evidence has proven that some cells of the central nervous system such as, for example, neuronal stem cells, can regenerate. The term “neuronal stem cell” refers to cells that can self-renew, give rise to other cells through asymmetric cell division/differentiation, generate neural tissue, or are derived from the nervous system. Neuronal stem cells exist in a post-implantation developing mammalian nervous system as fetal stem cells and in the adult nervous system as adult stem cells. Neurones and neuronal progenitors can also be derived from the more primitive embryonic stem cell of the inner cell mass (ICM) of the pre- or peri-implantation embryo. In another example, progenitor cells are found in an adult mammalian spinal cord and can be manipulated to mature into all of the major cell types that are found in the brain and spinal cord such as, for example, neurons and glial cells. These progenitor cells can be manipulated within the brain and spinal cord by administering growth factors.

[0035] The term “embryonic stem cell” refers to a primitive form of cell that can be isolated from an embryo days after conception, is unformed and unprogrammed, and has an innate ability to develop into any other type of cell in the body such as, for example, new brain cells, insulin-producing pancreas cells, heart muscle, and other tissues that could take the place of damaged or diseased cells. Accordingly, the implanting of embryonic stem cells can create not only neurons but also cells, tissues and organs of all other systems. When implanted into degenerating areas of the brain, for example, these cells have the capacity to acquire relevant cellular phenotype of the degenerated region and take on functions of cells that were lost through disease.

[0036] Autoimmune disorders can be organ-specific or systemic and are provoked by different pathogenic mechanisms. Examples of organ-specific autoimmune disorders include, but are not limited to, diabetes, hyperthyroidism, autoimmune adrenal insufficiency, pure red cell anemia, multiple sclerosis, and rheumatic carditis. Examples of systemic autoimmune diseases include systemic lupus erythematosus, rheumatoid arthritis, chronic inflammation, Sjogren's syndrome polymyositis, dermatomyositis and scleroderma. In some embodiments, a treatment of an autoimmune disorder can include administering a composition comprising an IL-8 mimetic. In other embodiments, a treatment of an autoimmune disorder can include administering a composition comprising an IL-8 mimetic before, during or after administering one or more other agents that are diagnostic, bioactive, biobeneficial, or a combination thereof.

[0037] Inflammatory disorders are manifested by an inflammatory response, which is initiated by injury that can be a result of trauma, ischemia or the introduction of foreign particles; and infection, which can be bacterial or viral. Inflammation includes a complex series of events including chemical mediators such as cytokines and prostaglandins; and inflammatory cells such as, for example, leukocytes.

[0038] The inflammatory response is a delicate interplay between the humoral and cellular immune elements that enables elimination of harmful agents and initiation of tissue repair. Unfortunately, the inflammatory response can be a disorder in its own right by causing considerable, and potentially more, damage to tissue than the disorder that initiated the inflammatory response. Examples of inflammatory disorders include, but are not limited to, acute and chronic inflammatory diseases such as, for example, arthritis, atheromas, colitis, chronic inflammatory bowel disease, chronic inflammatory pelvic disease, asthma, psoriasis, and rhinitis. Current treatments for inflammatory disorders include the use of non-steroidal anti-inflammatory drugs, which can cause, inter alia, gastrointestinal side effects; corticosteroids, which can cause, inter alia, an increased risk of infection; and immunosuppressive agents, which can leave a subject defenseless to infections.

[0039] In some embodiments, a treatment of an inflammatory disorder can include administering a composition comprising an IL-8 mimetic. In other embodiments, a treatment of an inflammatory disorder can include administering a composition comprising an IL-8 mimetic, either an agonist or antagonist, before, during or after administering one or more other agents. In these embodiments, the IL-8 mimetic can contain the N-terminal portion of the IL-8 and the C-terminal portion of the IL-8 connected by a linker.

[0040] Transplant rejections occur in recipients receiving tissue from donors that differ genetically, and such rejections are mediated by T-cell dependent mechanisms. Immunosuppressive agents such as calcineurin phosphatase inhibitors and glucocorticosteroids are administered to transplant recipients to prevent allograft rejection. Immunosuppressive agents have a short lasting effect, so transplant recipients normally require life-long treatment with such agents. Life-long treatment with immunosuppressive agents creates serious adverse effects in a recipient such as, for example, the development of infections and tumors.

[0041] The IL-8 mimetics of the present invention can be administered to transplant recipients to modulate cellular response and achieve effects that are diagnostic, therapeutic, prophylactic, ameliorative or a combination thereof. In some embodiments, a treatment of a transplant rejection can include administering a composition comprising an IL-8 mimetic. In other embodiments, a treatment of a transplant rejection can include administering a composition comprising an IL-8 mimetic before, during or after administering one or more other agents. In these embodiments, the IL-8 mimetic can contain the N-terminal portion of the IL-8 and the C-terminal portion of the IL-8 connected by a linker.

[0042] Cardiovascular disease is a broad, all-encompassing term that refers to a collection of diseases and conditions and is any disorder of the heart and blood vessels. Examples of cardiovascular disorders and treatments include, but are not limited to, any disease involving heart or vascular tissue such as, for example, atherosclerosis, and ischemic heart or vascular tissue requiring reconstruction and/or management. Traditional therapies used to treat cardiovascular disease have used either angioplasty procedures to compress blockages in arteries or coronary artery bypass grafts to provide an alternate path for blood flow around clogged vascular passageways. A latest generation of treatments includes “therapeutic angiogenesis,” which is an inducement of angiogenesis to produce new blood vessels that supplement or replace a diseased vascular passageway.

[0043] In some embodiments, a treatment of a cardiovascular disorder can include administering a composition comprising an IL-8 mimetic to modulate angiogenesis and assist in the reconstruction of heart or vascular tissue, which can include the proliferation and/or mobilization of endothelial cells such as, for example, vascular endothelial cells. In other embodiments, a treatment of a cardiovascular disorder can include administering compositions comprising an IL-8 mimetic before, during or after administering one more other agents. In these embodiments, the IL-8 mimetic can contain the N-terminal portion of the IL-8 and the C-terminal portion of the IL-8 connected by a linker.

[0044] The IL-8 mimetics can be used to treat conditions associated with cancer. Examples of conditions associated with cancer treatments such as, for example chemotherapy and radiotherapy and include, but are not limited to, a diverse group of hematopoietic stem cell disorders known as myelodysplastic syndrome (MDS). Such disorders are characterized by a cellular marrow with an impaired morphology and maturation (dysmyelopoiesis), peripheral blood cytopenias, and a variable risk of progression to acute leukemia that results from an ineffective blood cell production. See The Merck Manual 953, (17^{th} ed. 1999).

[0045] These disorders can result from an initial hematopoietic stem cell injury that can be from a variety of causes including, but not limited to, cytotoxic chemotherapy, radiation therapy, virus, chemical exposure and genetic predisposition. A clonal mutation predominates over bone marrow and suppresses healthy stem cells. In the early stages of MDS, for example, a main cause of cytopenia is an increase in programmed cell death, or apoptosis. As the disease progresses and converts into leukemia, gene mutation rarely occurs and a proliferation of leukemic cells overwhelms the healthy marrow. The course of the disease can vary, and some cases can behave as an indolent disease, whereas others can behave aggressively with a short clinical progression into an acute form of leukemia. Subjects that survive a malignancy treatment with chemotherapy drugs such as, for example, alkylating agents, with or without radiotherapy, can have a high incidence of developing MDS or secondary acute leukemia.

[0046] Examples of treatments for MDS include, but are not limited to, bone marrow transplantation, transfusions, and administration of hematopoietic growth factors and cytokines. Since the IL-8 mimetics are chemokines, they are part of the family of cytokines. In some embodiments, a treatment of a condition associated with cancer can include the administrating a composition comprising an IL-8 mimetic before, during or after chemotherapy or radiotherapy. In other embodiments, a treatment of a condition associated with cancer can include administering a composition comprising an IL-8 mimetic before, during or after administering one more other treatments or agents. In one example, an IL-8 mimetic can be administered as an antagonist to inhibit or prevent the proliferation of cancer cells. In another example, an IL-8 mimetic can be administered as an agonist during recovery from chemotherapy and/or radiotherapy to expedite recovery of the blood count. In these embodiments, the IL-8 mimetic can contain the N-terminal portion of the IL-8 and the C-terminal portion of the IL-8 connected by a linker.

[0047] Examples of other hematological disorders include, but are not limited to, bone marrow depression, aplastic anemia, agranulocytosis, leukopenia, pancytopenia, thrombocytopenia, macrocytic or megaloblastic anemia. In some embodiments, a treatment of a hematological disorder can include managing white blood cells, platelets, red blood cells, stem cells and various progenitor subsets by administering a composition comprising an IL-8 mimetic. In one example, an IL-8 can be administered as an agonist to increase the proliferation of blood cells and/or mobilize the blood cells into the bloodstream. In other embodiments, a treatment of a hematological disorder can include administering a composition comprising an IL-8 mimetic before, during or after administration of one or more other treatments or agents. In these embodiments, the IL-8 mimetic can contain the N-terminal portion of the IL-8 and the C-terminal portion of the IL-8 connected by a linker.

[0048] Examples of neurological disorders include, but are not limited to, Parkinson's disease, Alzheimer's disease, multiple sclerosis, and any other conditions associated with neuronal stem cells. Parkinson's disease, for example, can be treated with limited success in some cases by drugs including, but not limited to, L-beta-3,4-dihydroxyphenylalanine hydrochloride (L-Dopa). Alzheimer's disease, for example, is irreversible despite treatments with drugs including, but not limited to, ARICEPT®. Such treatments have had limited success in ameliorating symptoms and slowing progression of the disease, but most patients with Alzheimer's disease require some sort of palliative care. Multiple sclerosis, for example, is sometimes responsive to the anti-inflammatory drugs including, but not limited to, β-interferon, but patients with multiple sclerosis remain incurable over the long term. As a result, subjects with multiple sclerosis develop permanent motor, sensory and cognitive deficits. In general, the treatment and reversal of neurodegenerative diseases of the brain and spinal cord remains a formidable challenge.

[0049] In some embodiments, a treatment of a neurological disorder can include administration of a composition comprising an IL-8 mimetic. In other embodiments, a treatment of a neurological disorder can include administering a composition comprising an IL-8 mimetic before, during or after administering one more other treatments or agents. In one example, an IL-8 mimetic can be administered as an agonist to mobilize stem cells in the treatment of a disease. In these embodiments, the IL-8 mimetic can contain the N-terminal portion of the IL-8 and the C-terminal portion of the IL-8 connected by a linker.

[0050] The IL-8 Mimetics

[0051] The IL-8 mimetics correspond to modifications of a native IL-8 chemokine and include, but are not limited to, modifications of an N-terminus; modifications of a C-terminus; modifications of an internal region; modifications of an N-terminal region containing a sequence Glu-Leu-Arg; modifications of an internal region containing three anti-parallel β-sheets in the structure; modifications of a C-terminal region containing an α-helical structure; modifications of a combination of N-terminal and C-terminal regions; combinations of these modifications linked together either directly or through a linker; combinations of N-terminal and internal regions and modifications thereof; combinations of internal and C-terminal regions and modifications thereof; combinations of N-terminal, internal and C-terminal regions and modifications thereof; and combinations thereof. In some embodiments, the N-terminal region of each sequence must include a sub-sequence of Glu-Leu-Arg, and each C-terminal region must include a sub-sequence of residues 56-71 (SEQ ID NO:26).

[0052] In some embodiments, the IL-8 mimetics may be created by either directly or indirectly connecting at least one modifying group. The term “modifying group.” refers to any functional group composing a portion of an IL-8 mimetic that was either absent in the native IL-8 chemokine or that comprises an isolated sequence of less than four amino acids. Such sequences are “isolated” in that they are positioned differently in the IL-8 mimetic than they were positioned in the native IL-8 chemokine. A modifying group can also be a linker, and linkers are described below.

[0053] A modifying group can be connected, for example, to the N-terminus or C-terminus of a peptide; to a peptidic or peptidomimetic region flanking the core domain; to a side chain of at least one amino acid residue such as, for example, an ε-amino group of a lysyl residue, a carboxyl group of an aspartic acid or glutamic acid residue, a hydroxy group of a tyrosyl, serine or threonine residue, or other suitable reactive group on an amino acid side chain; or in-chain as a linker. Examples of chemical connections used to attach the modifying groups include, but are not limited to, ether, amide, ester, anhydride, orthoester, alkylamine, sulphide, disulphide, carbamate, all-aromatic carbonate, urea bonds, and the like.

[0054] In general, a modifying group can include any of the functional groups described below. In addition, the functional group may also be a “biotinyl structure”, which includes biotinyl groups and analogues and derivatives thereof. Examples of biotinyl structures include, but are not limited to, iminiobiotinyl structures such as, for example, a 2-iminobiotinyl group.

[0055] In some embodiments, the modifications can control the pharmacokinetic or pharmacodynamic properties of an IL-8 mimetic without substantially reducing its bioactive function. In other embodiments, the modifications can alter in vivo stability, bioavailability, or half-life of a mimetic. In other embodiments, the modifications can provide a diagnostic capability such as, for example, by creating a means of detecting the presence or location of a mimetic in vivo or in vitro. Examples of detectable substances are described below.

[0056] In other embodiments, the IL-8 mimetics can act as an agonist or an antagonist to a native IL-8 chemokine. The agonistic activities of the IL-8 mimetics includes, but are not limited to, mimicking or inhibiting the biological activity of the native IL-8 chemokine. The term “biological activity” refers to the biological actions of the native IL-8 chemokine and its mimetics. In some embodiments, the biological actions may be determined by performing standard assays of, for example, receptor binding, white blood cell mobilization, other forms of chemotaxis, and other measurable biological actions related to the presence or absence of a native IL-8 chemokine or mimetic.

[0057] The amino acids are identified in the present application by the following conventional three-letter abbreviations. The single letter identifier is provided for ease of reference. The three-letter abbreviations are generally accepted in the peptide art, recommended by the IUPAC-IUB commission in biochemical nomenclature, and are required by WIPO Standard ST.25:

| | | | | | |
|---|---|---|---|---|---|
| Alanine | A | Ala | Leucine | L | Leu |
| Arginine | R | Arg | Lysine | K | Lys |
| Asparagine | N | Asn | Methionine | M | Met |
| Aspartic acid | D | Asp | Phenylalanine | F | Phe |
| Cysteine | C | Cys | Proline | P | Pro |
| Glutamic acid | E | Glu | Serine | S | Ser |
| Glutamine | Q | Gln | Threonine | T | Thr |
| Glycine | G | Gly | Tryptophan | W | Trp |
| Histidine | H | His | Tyrosine | Y | Tyr |
| Isoleucine | I | Ile | Valine | V | Val |
| Ornithine | O | Orn | Other | | Xaa |

[0058] Furthermore, the peptide sequences are taught according to the generally accepted convention of placing the N-terminus on the left and the C-terminus on the right of the sequence listing as required by WIPO Standard ST.25.

[0059] The functional groups of the present invention can be independently selected from substituted, unsubstituted, hetero-, straight-chained, branched, cyclic, saturated or unsaturated aliphatic radical; or a substituted, unsubstituted, or hetero-aromatic radicals. For example, a functional group can be selected from H; aliphatic hydrocarbon groups such as, for example, alkyl, alkenyl, and alkynyl groups; aromatic groups such as, for example, aryl, aralkyl, aralkenyl, and aralkynyl groups; and, various other groups as defined below.

[0060] In some embodiments of the present invention, the aliphatic radicals have from about 1 to about 50 carbon atoms, from about 2 to about 40 carbon atoms, from about 3 to about 30 carbon atoms, from about 4 to about 20 carbon atoms, from about 5 to about 15 carbon atoms, from about 6 to about 10 carbon atoms, and any range therein. In some embodiments, the aromatic radicals have from about 6 to about 180 carbon atoms, from about 12 to about 150 carbon atoms, from about 18 to about 120 carbon atoms, from about 24 to about 90 carbon atoms, from about 30 to about 60 carbon atoms, and any range therein.

[0061] The term “alkyl” can be used interchangeably with the term “alkylene” in some contexts and refers to a straight-chained or branched hydrocarbon chain. Examples of alkyl groups include lower alkyl groups such as, for example, methyl, ethyl, n-propyl, iso-propyl, n-butyl, iso-butyl, t-butyl or iso-hexyl; upper alkyl groups such as for example, n-heptyl, n-octyl, iso-octyl, nonyl, decyl, and the like; lower alkylene such as, for example, ethylene, propylene, butylenes, butadiene, pentene, n-hexene and iso-hexene; and upper alkylene such as, for example, n-heptene, n-octene, iso-octene, nonene, decene, and the like. Persons of ordinary skill in the art are familiar with numerous straight-chained and branched alkyl groups, which are within the scope of the present invention. In addition, such alkyl groups may also contain various substituents in which one or more hydrogen atoms can be replaced by a functional group, or the alkyl groups can contain an in-chain functional group.

[0062] The term “alkenyl” refers to a straight-chained or branched hydrocarbon chain where at least one of the carbon-carbon linkages is a carbon-carbon double bond. The term “alkynyl” refers to a straight-chained or branched hydrocarbon chain where at least one of the carbon-carbon linkages is a carbon-carbon triple bond.

[0063] The term “aryl” refers to a hydrocarbon ring bearing a system of conjugated double bonds often comprising at least six π (pi) electrons. Examples of aromatic groups include, but are not limited to, phenyl, pyrrolyl, furyl, thiophenyl, imidazolyl, oxazole, thiazolyl, triazolyl, pyrazolyl, pyridyl, pyrazinyl, pyridazinyl and pyrimidinyl, naphthyl, anysyl, toluyl, xylenyl, and the like. The term “aralkyl” refers to an alkyl group substituted with at least one aryl group. Examples of aralkyls include substituted benzyls such as, for example, phenylmethyl, 2-naphthylethyl, 2-(2-pyridyl)propyl, 5-dibenzosuberyl, and the like. The term “aralkenyl” refers to an alkenyl group substituted with at least one aryl group. Those aryl groups having heteroatoms in the ring structure may also be referred to as “aryl heterocycles” or “heteroaromatics.” The aromatics can be substituted at one or more ring positions and can also be part of a polycyclic group. For example, aryl groups can include fused aromatic moieties such as naphthyl, anthracenyl, quinolyl, indolyl, and the like.

[0064] The phrase “straight-chained or branched” includes any substituted or unsubstituted acyclic carbon-containing compounds including, but not limited to, alkanes, alkenes and alkynes. A radical is “straight-chained” when it has less than 0.1 mole percent of sidechains having 1 or more carbon atoms. In some embodiments, a radical is straight-chained if it has less than 0.01 mole percent of such sidechains. In other embodiments, a radical is straight-chained if it has less than 0.001 mole percent of such sidechains. A radical is “branched” when it has more than 0.1 mole percent of sidechains having 1 or more carbon atoms. In some embodiments, a radical is branched when it has more than 0.01 mole percent of such sidechains. In other embodiments, a radical is branched when it has more than 0.001 mole percent of such sidechains.

[0065] The terms “radical,” “group,” “functional group,” and “substituent” can be used interchangeably in some contexts and can be used together to further describe a chemical structure. For example, the term “functional group” can refer to a chemical “group” or “radical,” which is a chemical structure variable that is in-chain, pendant and/or terminal to the chemical structure. In some embodiments, a straight chain or branched alkyl has from about 1 to about 20 carbon atoms, from about 2 to about 18 carbon atoms, from about 3 to about 17 carbon atoms, from about 5 to about 15 carbon atoms, from about 2 to about 10 carbon atoms, or any range therein. In other embodiments, a cycloalkyl may have a ring structure containing from about 2 to about 12 carbon atoms, from about 3 to about 11 carbon atoms, from about 4 to about 10 carbon atoms, or any range therein.

[0066] A functional group may comprise a cyclic or polycyclic group. The term “cyclic group” refers to a ring structure that can be substituted, unsubstituted, hetero-, saturated or unsaturated and have from 3 to 24 carbon atoms, from 3 to 18 carbon atoms, from 3 to 12 carbon atoms, or any range therein. Examples of cyclic groups include, but are not limited to, cycloalkyls such as cyclopropyl, cyclobutyl, cyclopentyl, cyclohexyl, and cyclooctyl structures; cycloalkenes; and aromatics. The term “polycyclic group” refers to two or more substituted, unsubstituted, hetero-, saturated or unsaturated cyclic rings in which two or more ring carbons are common among two adjoining rings such that the rings are “fused rings.” The rings can also be “bridged rings” in that they are joined through atoms that are not common among the adjoining rings.

[0067] The term “substituted” is used to characterize a chemical structure that has been modified by the addition of at least one functional group to at least one position that can be in-chain, pendant, and/or terminal to the chemical structure. The terms “radical,” “group,” “functional group” and “substituent” can be used interchangeably in some contexts to describe a chemical that has been added to another chemical to modify its structure. In some embodiments, the functional groups can include, but are not limited to, aliphatics, aromatics, and combinations thereof; alkyls, alkenes, alkynes, cyclic structures, heterocyclic structures, and combinations thereof.

[0068] In other embodiments, the functional groups can include, but are not limited to, oxygen-containing groups such as, for example, alcohols, ethers, phenols, and derivatives thereof. Such oxygen-containing groups include, but are not limited to, acetonides, alcohols, alkoxides, bisphenols, carbinols, cresols, diols, enols, enolates, epoxides, ethers, glycols, hydroperoxides, peroxides, phenols, phenolates, phenoxides, pinacols, trioxides, and ynols.

[0069] In other embodiments, the functional groups can include, but are not limited to, oxygen-containing groups such as, for example, aldehydes, ketones, quinones and derivatives thereof. Such oxygen-containing groups include, but are not limited to, acetals, acyloins, aldehydes, carbonyl compounds, diosphenols, dypnones, hemiacetals, hemiketals, ketals, ketenes, keto compounds, ketones, quinhydrones, quinomethanes, quinines, and combinations thereof.

[0070] In other embodiments, the functional groups can include, but are not limited to, oxygen-containing groups such as, for example, carboxylic acids and derivatives thereof. Such oxygen-containing groups include, but are not limited to, carboxylic acids, oxoacids, sulfonic acids, acid anhydrides, acid thioanhydrides, acyl groups, acyl halides, acylals, anhydrides, carboxylic acids, cyclic acid anhydrides, cyclic anhydrides, esters, fulgides, lactides, lactols, lactones, macrolides, naphthenic acids, ortho acids, ortho esters, oxo carboxylic acids, peroxy acids, and combinations thereof,

[0071] In other embodiments, the functional groups can include, but are not limited to, nitrogen-containing groups containing one nitrogen such as, for example, aldimines, aldoximes, alkoxyamines, amic acids, amides, amines, amine oxides, amine ylides, carbamates, hemiaminals, carbonitriles, carboxamides, isocyanides, cyanates, isocyanates, diisocyanates, cyanides, cyanohydrins, diacylamines, enamines, fulminates, hemiaminals, hydroxamic acids, hydroximic acids, hydroxylamines, imides, imidic acids, imidines, imines, oximes, isoureas, ketenimines, ketimines, ketoximes, lactams, lactims, nitriles, nitro, nitroso, nitrosolic acids, oxime O-ethers, quaternary ammonium compounds, quinone imines, quinonoximes, azomethines, ureides, urethanes, and combinations thereof.

[0072] In other embodiments, the functional groups can include, but are not limited to, nitrogen-containing groups containing two or more nitrogens such as, for example, aldazines, amide hydrazones, amide oximes, amidines, amidrazones, aminals, amine imides, amine imines, isodiazenes, azans, azides, azo imides, azines, azo compounds, azomethine imides, azoxy compounds, carbodiimides, carboxamidines, diamidides, diazo compounds, diazoamino compounds, diazoates, diazooxides, formamidine disulfides, formazans, hydrazides, hydrazide hydrazones, hydrazide imides, hydrazidines, hydrazines, hydrazo compounds, hydrazones, ketazines, nitramines, nitrile imines, nitrimines, nitrolic acids, nitrosamides, nitrosamines, nitrosimines, ortho amides, semicarbazones, semioxamazones, triazanes, triazenes, and combinations thereof.

[0073] In other embodiments, the functional groups can include, but are not limited to, sulfur-containing groups such as thio, thiol, thioether, sulfonyl, sulfido, sulfinamides, sulfilimines, sulfimines, sulfimides, sulfinamidines, sulfines, sulfinic acids, sulfinic anhydrides, sulfinylamines, sulfonamides, sulfones, sulfonediimines, sulfonic acids, sulfonic anhydrides, sulfoxides, sulfoximides;

[0074] In other embodiments, the functional groups can include, but are not limited to, silyl groups, halogens, selenoethers, trifluoromethyls, thio-derivatives of urethanes where at least one oxygen atom is replaced by a sulfur atom; phosphoryls, phosphonates, phosphinates; and ethyleneically unsaturated groups such as, for example, allyl, acryloyl and methacrylol, and maleate and maleimido; and combinations thereof.

[0075] Examples of heteroatoms of the hetero-radicals include, but are not limited to, sulfur, phosphorous, oxygen, nitrogen and combinations thereof. Examples of heterocyclic groups include, but are not limited to, pyrrolidine, oxolane, thiolane, imidazole, oxazole, piperidine, piperazine, and morpholine. The heterocyclics may also be bridged or fused to other cyclic groups as described below.

[0076] In some embodiments, the modifying groups can include, but are not limited to, O-modified derivatives including, but not limited to, C-terminal hydroxymethyl benzyl ether, and other C-terminal hydroxymethyl derivatives; N-modified derivatives including, but not limited to, substituted amides such as alkylamides; hydrazides and compounds in which a C-terminal phenylalanine residue is replaced with a phenethylamide analogue such as, for example, by replacing Ser-Ile-Phe with Ser-Ile-phenethylamide.

[0077] In other embodiments, the functional group may include a fluorescein-containing group. Examples of fluorescein-containing groups include, but are not limited to, 5-(and 6-)-carboxyfluorescein succinimidyl ester and fluorescein isothiocyanate. In other embodiments, the modifying group may include a cholyl structure. An example of a cholyl derivative is 3-(O-aminoethyl-iso)-cholyl (Aic).

[0078] In other embodiments, the functional group may include N-acetylneuraminyl, trans-4-cotininecarboxyl, 2-imino-1-imidazolidineacetyl, (S)-(−)-indoline-2-carboxyl, 2-norbornaneacetyl, γ-oxo-5-acenaphthenebutyryl, (−)-2-oxo-4-thiazolidinecarboxyl group, tetrahydro-3-furoyl group, 4-morpholinecarbonyl group, 2-thiopheneacetyl group, 2-thiophenesulfonyl group, diethylene-triaminepentaacetyl group, (O)-methoxyacetyl group, N-acetylneuraminyl group, and combinations thereof. In other embodiments, the functional group may include light scattering groups, magnetic groups, nanogold, other proteins, a solid matrix, radiolabels, carbohydrates, and combinations thereof.

[0079] In other embodiments, the functional groups may include biobeneficial, bioactive, and/or diagnostic agents. A “bioactive agent” is a functional group that can be connected to the IL-8 mimetic to provide a therapeutic effect, a prophylactic effect, both a therapeutic and a prophylactic effect, or other biologically active effect. A “biobeneficial agent” is a functional group that can also be connected to an IL-8 mimetic to provide a biological benefit within a subject. In one example, a biobeneficial agent can be non-inflammatory, such as, for example, by acting as a biomimic to passively avoid attracting monocytes and neutrophils, which leads to the cascade of events creating inflammation.

[0080] A “diagnostic agent” is a type of bioactive agent that can be used, for example, in diagnosing the presence, nature, or extent of a disease or medical condition in a subject. In one embodiment, a diagnostic agent can be any agent that may be used in connection with methods for imaging an internal region of a patient and/or diagnosing the presence or absence of a disease in a patient. Diagnostic agents include, for example, contrast agents for use in connection with ultrasound imaging, magnetic resonance imaging (MRI), nuclear magnetic resonance (NMR), computed tomography (CT), electron spin resonance (ESR), nuclear medical imaging, optical imaging, elastography, radiofrequency (RF) and microwave laser. Diagnostic agents may also include any other agents useful in facilitating diagnosis of a disease or other condition in a patient, whether or not imaging methodology is employed.

[0081] In some embodiments, the biobeneficial agents can have a reactive group that can be used to connect the agent to an IL-8 mimetic. Examples of such reactive groups include, but are not limited to, hydroxyl, carboxyl, and amino groups. In other embodiments, the biobeneficial agents can remain attached to the IL-8 mimetic or be controllably released from the IL-8 mimetic.

[0082] In some embodiments, the molecular weight of an agent connected to an IL-8 mimetic should be at or below about 40,000 Daltons, or any range therein, to ensure elimination of the agent from a subject. In one embodiment, the molecular weight of the agent ranges from about 300 Daltons to about 40,000 Daltons, from about 8,000 Daltons to about 30,000 Daltons, from about 10,000 Daltons to about 20,000 Daltons, or any range therein. It is to be appreciated that one skilled in the art should recognize that some of the groups, subgroups, and individual biobeneficial agents may not be used in some embodiments of the present invention.

[0083] Examples of biobeneficial agents include, but are not limited to, many of the polymers listed above such as, for example, carboxymethylcellulose, poly(alkylene glycols), poly(N-vinyl pyrrolidone), poly(acrylamide methyl propane sulfonic acid), poly(styrene sulfonate), sulfonated dextran, polyphosphazenes, poly(orthoesters), poly(tyrosine carbonate), dermatan sulfate, hyaluronic acid, heparin and any derivatives, analogs, homologues, congeners, salts, copolymers and combinations thereof.

[0084] Examples of heparin derivatives include, but are not limited to, earth metal salts of heparin such as, for example, sodium heparin, potassium heparin, lithium heparin, calcium heparin, magnesium heparin, and low molecular weight heparin. Other examples of heparin derivatives include, but are not limited to, heparin sulfate, heparinoids, heparin-based compounds and heparin derivatized with hydrophobic materials.

[0085] Examples of poly(alkylene glycols) include, but are not limited to, PEG, mPEG, poly(ethylene oxide), poly(propylene glycol)(PPG), poly(tetramethylene glycol), and any derivatives, analogs, homologues, congeners, salts, copolymers and combinations thereof. In some embodiments, the poly(alkylene glycol) is PEG. In other embodiments, the poly(alkylene glycol) is mPEG. In other embodiments, the poly(alkylene glycol) is poly(ethylene glycol-co-hydroxybutyrate).

[0086] The copolymers that may be used as biobeneficial agents include, but are not limited to, any derivatives, analogs, homologues, congeners, salts, copolymers and combinations of the foregoing examples of agents. Examples of copolymers that may be used as biobeneficial agents in the present invention include, but are not limited to, dermatan sulfate, which is a copolymer of D-glucuronic acid or L-iduronic acid and N-acetyl-D-galactosamine; poly(ethylene oxide-co-propylene oxide); copolymers of PEG and hyaluronic acid; copolymers of PEG and heparin; copolymers of PEG and hirudin; graft copolymers of poly(L-lysine) and PEG; copolymers of PEG and a poly(hydroxyalkanoate) such as, for example, poly(ethylene glycol-co-hydroxybutyrate); and, any derivatives, analogs, congeners, salts, or combinations thereof. In some embodiments, the copolymer that may be used as a biobeneficial agent can be a copolymer of PEG and hyaluronic acid, a copolymer of PEG and hirudin, and any derivative, analog, congener, salt, copolymer or combination thereof. In other embodiments, the copolymer that may be used as a biobeneficial agent is a copolymer of PEG and a poly(hydroxyalkanoate) such as, for example, poly(hydroxybutyrate); and any derivative, analog, congener, salt, copolymer or combination thereof.

[0087] The bioactive agents can be any moiety capable of contributing to a therapeutic effect, a prophylactic effect, both a therapeutic and prophylactic effect, or other biologically active effect in a subject. A bioactive agent can also have diagnostic properties. The bioactive agents include, but are not limited to, small molecules, nucleotides, oligonucleotides, polynucleotides, amino acids, oligopeptides, polypeptides, and proteins. Bioactive agents include, but are not limited to, antiproliferatives, antineoplastics, antimitotics, anti-inflammatories, antiplatelets, anticoagulants, antifibrins, antithrombins, antibiotics, antiallergics, antioxidants, and any prodrugs, codrugs, metabolites, analogs, homologues, congeners, derivatives, salts and combinations thereof. It is to be appreciated that one skilled in the art should recognize that some of the groups, subgroups, and individual bioactive agents may not be used in some embodiments of the present invention.

[0088] Antiproliferatives include, for example, actinomycin D, actinomycin IV, actinomycin I1, actinomycin X1, actinomycin C1, and dactinomycin (Cosmegen®, Merck & Co., Inc.). Antineoplastics or antimitotics include, for example, paclitaxel (Taxol®, Bristol-Myers Squibb Co.), docetaxel (Taxotere®, Aventis S.A.), methotrexate, azathioprine, vincristine, vinblastine, fluorouracil, doxorubicin hydrochloride (Adriamycin®, Pfizer, Inc.) and mitomycin (Mutamycin®, Bristol-Myers Squibb Co.), and any prodrugs, codrugs, metabolites, analogs, homologues, congeners, derivatives, salts and combinations thereof. Antiplatelets, anticoagulants, antifibrin, and antithrombins include, for example, sodium heparin, low molecular weight heparins, heparinoids, hirudin, argatroban, forskolin, vapiprost, prostacyclin and prostacyclin analogues, dextran, D-phe-pro-arg-chloromethylketone (synthetic antithrombin), dipyridamole, glycoprotein IIb/IIIa platelet membrane receptor antagonist antibody, recombinant hirudin, and thrombin inhibitors (Angiomax®, Biogen, Inc.), and any prodrugs, codrugs, metabolites, analogs, homologues, congeners, derivatives, salts and combinations thereof. Cytostatic or antiproliferative agents include, for example, angiopeptin, angiotensin converting enzyme inhibitors such as captopril (Capoten® and Capozide®, Bristol-Myers Squibb Co.), cilazapril or lisinopril (Prinivil® and Prinzide®, Merck & Co., Inc.); calcium channel blockers such as nifedipine; colchicines; fibroblast growth factor (FGF) antagonists, fish oil (omega 3-fatty acid); histamine antagonists; lovastatin (Mevacor®, Merck & Co., Inc.); monoclonal antibodies including, but not limited to, antibodies specific for Platelet-Derived Growth Factor (PDGF) receptors; nitroprusside; phosphodiesterase inhibitors; prostaglandin inhibitors; suramin; serotonin blockers; steroids; thioprotease inhibitors; PDGF antagonists including, but not limited to, triazolopyrimidine; and nitric oxide, and any prodrugs, codrugs, metabolites, analogs, homologues, congeners, derivatives, salts and combinations thereof. Antiallergic agents include, but are not limited to, pemirolast potassium (Alamast®, Santen, Inc.), and any prodrugs, codrugs, metabolites, analogs, homologues, congeners, derivatives, salts and combinations thereof.

[0089] Examples of heparin derivatives include, but are not limited to, earth metal salts of heparin such as, for example, sodium heparin, potassium heparin, lithium heparin, calcium heparin, magnesium heparin, and low molecular weight heparin. Other examples of heparin derivatives include, but are not limited to, heparin sulfate, heparinoids, heparin-based compounds and heparin derivatized with hydrophobic materials.

[0090] Examples of hyaluronic acid derivates include, but are not limited to, sulfated hyaluronic acid such as, for example, O-sulphated or N-sulphated derivatives; esters of hyaluronic acid wherein the esters can be aliphatic, aromatic, arylaliphatic, cycloaliphatic, heterocyclic or a combination thereof; crosslinked esters of hyaluronic acid wherein the crosslinks can be formed with hydroxyl groups of a polysaccharide chain; crosslinked esters of hyaluronic acid wherein the crosslinks can be formed with polyalcohols that are aliphatic, aromatic, arylaliphatic, cycloaliphatic, heterocyclic, or a combination thereof; hemiesters of succinic acid or heavy metal salts thereof; quaternary ammonium salts of hyaluronic acid or derivatives such as, for example, the O-sulphated or N-sulphated derivatives.

[0091] Other bioactive agents useful in the present invention include, but are not limited to, free radical scavengers; nitric oxide donors; rapamycin; everolimus; tacrolimus; 40-O-(2-hydroxy)ethyl-rapamycin; 40-O-(3-hydroxy)propyl-rapamycin; 40-O-[2-(2-hydroxy)ethoxy]ethyl-rapamycin; tetrazole containing rapamycin analogs such as those described in U.S. Pat. No. 6,329,386; estradiol; clobetasol; idoxifen; tazarotene; alpha-interferon; host cells such as epithelial cells; genetically engineered epithelial cells; dexamethasone; cytokines; chemokines, chemokine mimetics, chemokine receptor ligands, and, any prodrugs, codrugs, metabolites, analogs, homologues, congeners, derivatives, salts and combinations thereof.

[0092] Free radical scavengers include, but are not limited to, 2,2′,6,6′-tetramethyl-1-piperinyloxy, free radical (TEMPO); 4-amino-2,2′,6,6′-tetramethyl-1-piperinyloxy, free radical (4-amino-TEMPO); 4-hydroxy-2,2′,6,6′-tetramethyl-piperidene-1-oxy, free radical (TEMPOL), 2,2′,3,4,5,5′-hexamethyl-3-imidazolinium-1-yloxy methyl sulfate, free radical; 16-doxyl-stearic acid, free radical; superoxide dismutase mimic (SODm) and any analogs, homologues, congeners, derivatives, salts and combinations thereof. Nitric oxide donors include, but are not limited to, S-nitrosothiols, nitrites, N-oxo-N-nitrosamines, substrates of nitric oxide synthase, diazenium diolates such as spermine diazenium diolate and any analogs, homologues, congeners, derivatives, salts and combinations thereof. Chemokines include, but are not limited to, IL-8, IP-10, MIP-1α, RANTES, I-309, MCP-1, CCL28, and SDF-1. Chemokines and chemokine mimetics include, but are not limited to, those taught in U.S. Patent Application Publication Nos. 2002/0156034, 2002/0165123, and 2003/0148940; and U.S. patent application Ser. No. 10/243,795; each of which is incorporated by reference herein in its entirety. Chemokine receptor ligands include, but are not limited to, those taught in U.S. Pat. Nos. 6,515,001 and 6,693,134; and U.S. Patent Application Publication Nos. 2003/0004136, 2003/0045550, 2003/0092674, and 2003/0125380; each of which is incorporated by reference herein in its entirety.

[0093] Diagnostic agents include, but are not limited to, materials that are radiopaque, radioactive, paramagnetic, fluorescent, lumiscent, and detectable by ultrasound. In some embodiments, the radiopaque agents are materials comprising iodine or iodine-derivatives such as, for example, iohexal and iopamidol. In other embodiments, the radioactive materials are radioisotopes, which can be detected by tracing radioactive emissions. Examples of radioactive materials include, but are not limited to, ¹⁴C, ¹²³I, ¹²⁴I, ¹²⁵I, ¹³¹I, ^{99m}Tc, ³⁵S or ³H. In other embodiments, the paramagnetic agents include, but are not limited to, gadolinium chelated compounds. Examples of fluorescent agents include, but are not limited to, indocyanine green, umbelliferone, fluorescein, fluorescein isothiocyanate, rhodamine, dichlorotriazinylamine fluorescein, dansyl chloride or phycoerythrin. Examples of agents detectable by ultrasound include, but are not limited to, perflexane, Albunex® and Optison®. Examples of agents used in PET include, but are not limited to, fluorodeoxyglucose, sodium fluoride, methionine, choline, deoxyglucose, butanol, raclopride, spiperone, bromospiperone, carfentanil, and flumazenil. Other examples of detectable substances include, but are not limited to, various enzymes and prosthetic groups. Examples of suitable enzymes include, but are not limited to, horseradish peroxidase, alkaline phosphatase, β-galactosidase, or acetylcholinesterase. Examples of suitable prosthetic group complexes include, but are not limited to, streptavidin/biotin and avidin/biotin.

[0094] Labeled IL-8 mimetics can be used to assess in vivo pharmacokinetics, as well as detect the progression of a disease or the propensity of a subject to develop a disease. For example, chemokine receptors for tissue distribution can be detected using a labeled IL-8 mimetic either in vivo or in an in vitro sample derived from a subject. In some embodiments, an IL-8 mimetic may be radioactively labeled with ¹⁴C, either by incorporation of ¹⁴C into the modifying group or one or more amino acid structures in the IL-8 mimetic.

[0095] A modifying group can be chosen to provide a chelation site for a diagnostic label. In one embodiment, the modifying group can be the Aic derivative of cholic acid, which provides a free amino group. In another example, a tyrosine residue within an IL-8 sequence may be substituted with radioactive iodotyrosyl. In other embodiments, an IL-8 mimetic may be labeled with radioactive technetium or iodine. In fact, any isotope of radioactive iodine may be incorporated to create a diagnostic agent. In some embodiments, ¹²³I has a half-life of 13.2 hours and can be used for whole body scintigraphy; ¹²⁴I has a half life of 4 days and can be used for PET; ¹²⁵I has a half life of 60 days and can be used for metabolic turnover studies; and, ¹³¹I has a half life of 8 days and can be used for whole body counting and delayed low resolution imaging studies.

[0096] Aminopeptidases and carboxypeptidases have been found to have important functions in biological activities such as, for example, diabetes, memory and learning, antigen formation, and angiogenesis. The term “aminopeptidase” refers to a multifunctional enzyme that cleaves proteins from the N-terminus. Aminopeptidases can be classified into a number families such as, for example, the zinc-containing (M1) aminopeptidase family which consists of nine aminopeptidases that include, but are not limited to, placental leucine aminopeptidase (P-LAP), adipocyte-derived leucine aminopeptidase (A-LAP) and leukocyte-derived arginine aminopeptidase (L-RAP). Modulation of aminopeptidase activity can have many therapeutic and prophylactic applications. In one example, control of the activity of P-LAP can control the inducement of uterine contractions and treat or prevent disorders such as premature delivery and spontaneous abortion, as well as other disorders associated with water resorption, memory and learning and glucose metabolism. In another example, control of the activity of A-LAP can treat disorders associated with antigen production, blood pressure and inflammation. In another example, control of the activity of L-RAP can treat disorders association with antigen formation.

[0097] Although both aminopeptidases and carboxypeptidases can terminate biological activity, the carboxypeptidases clearly predominate in such terminations. The term “carboxypeptidase” refers to a multifunctional enzyme that cleaves proteins from the C-terminus. Carboxypeptidases are derived from the zymogens, procarboxypeptidase A and B. Modulation of carboxypeptidase activity can have many therapeutic and prophylactic applications. In one example, control of the activity of the carboxypeptidases such as kininase II (angiotensin-converting enzyme), carboxypeptidase M, and carboxypeptidase N, can potentially control hypertensive disorders relating to cardiovascular and kidney disorders. These carboxypeptidases are efficient at cleaving the C-terminal arginine of kinins, which appear to be important regulators of cardiovascular function; and are likely participants in the actions of drugs that affect the heart, kidney, and circulation. The kinins also have some role in the regulation of local and systemic hemodynamics; vascular permeability; inflammatory response; activation of neuronal pathways; and movement of electrolytes, water, and metabolic substrates across epithelia and into other tissues. Accordingly, control of carboxypeptidase activity can control the activity of other chemicals such as, for example, kinins, and thus can have many therapeutic applications in the diagnosis and treatment of disease.

[0098] In some embodiments, a modification may be introduced at the C-terminus of a peptide, the N-terminus of a peptide, in the region between the C-terminus and N-terminus, or a combination thereof. In some embodiments, a modification to the C-terminus may reduce the ability of an IL-8 mimetic to act as a substrate for carboxypeptidases. Examples of such C-terminal modifiers include, but are not limited to, an amide group, an ethylamide group and various non-natural amino acids such as, for example, D-amino acids and β-alanine. In another embodiment, a modification of a C-terminus may be accompanied by a modification to the N-terminus to reduce the ability of an IL-8 mimetic to act as a substrate for aminopeptidases. Examples of such N-terminus modifiers include, but are not limited to acyl, alkyl, aryl, arylalkyl, hydroxyalkyl, alkanoyl groups, alkanoics, diacids, and other modifiers having a carboxyl functional group. In another embodiment, the modification to an N-terminus can be deamidation.

[0099] In another embodiment, an IL-8 mimetic may be prepared in a “prodrug” form, wherein the mimetic begins acting upon its metabolism in vivo, in which the mimetic can become, for example, an agonist or an antagonist. Accordingly, such a prodrug form of an IL-8 mimetic can also deliver another agent upon its metabolism in vivo, and is known as a “codrug” form of the IL-8 mimetic. Examples of such agents include the bioactive agents, biobeneficial agents, diagnostic agents, and additional IL-8 mimetics. In some embodiments, the agent comprises a glycosaminoglycan such as for example, heparin, hirudin, hyaluronic acid, and any prodrugs, codrugs, metabolites, analogs, homologues, congeners, derivatives, salts and combinations thereof. In other embodiments, the agent comprises a phospholipid such as, for example, phosphatidylcholine (lecithin). In some embodiments, the phospholipids can be conjugated to any functional group on an IL-8 mimetic, wherein the phospholipid and/or the IL-8 mimetic can be modified as necessary. In these embodiments, the phospholipids can be connected to an amino functional group, such as for example the N-terminus of an IL-8 mimetic. It is to be appreciated that one skilled in the art should recognize that some of the groups, subgroups, and individual biobeneficial agents described herein may not be used in some embodiments of the present invention.

[0100] Phosphatidylcholine is a phospholipid that is a major constituent of cell membranes. Phosphatidylcholine may have hepatoprotective activity, is important for normal cellular membrane composition and repair, and is the major delivery form of the essential nutrient choline, which is a precursor in the synthesis of the neurotransmitter acetylcholine. Phosphatidylcholine's role in the maintenance of cell-membrane integrity is vital to all of the basic biological processes such as, for example, information flow that occurs within cells in the transcription of DNA to RNA; the translation of RNA to proteins; the formation of cellular energy; and intracellular communication or signal transduction. Phosphatidylcholine has a fluidizing effect on cellular membranes, which is important in that a decrease in cell-membrane fluidization, a breakdown of cell-membrane integrity, and an impairment of cell-membrane repair mechanisms are associated with a number of disorders, including, but not limited to liver disease, neurological diseases, various cancers, cell death.

[0101] The IL-8 mimetics can be administered as a codrug with phosphatidylcholine in an effective amount to diagnose, prevent, treat, or ameliorate a symptom of a disease. In some embodiments, the disease can be liver disease. The liver diseases may include, but are not limited to, alcoholic and non-alcoholic liver disorders such as, for example, fibrosis; cirrhosis; and hepatitis A, B, C and E. In other embodiments, the disease can be neurological disease. The neurological diseases include, but are not limited to, manic conditions; cognitive disorders such as old-age memory loss, short-term memory loss, and Alzheimer's Disease; and tardive dyskinesia. In other embodiments, the disease can be any cancer that is associated with a deficiency in choline and phosphatidylcholine such as, for example, liver cancer. In other embodiments, the disease can be a choline deficiency that results in apoptosis, atherosclerosis or a loss of memory. In some embodiments, an effective amount of phosphatidylcholine is a daily administration that ranges from about 10 mg/kg to about 1000 mg/kg, from about 20 mg/kg to about 800 mg/kg, from about 30 mg/kg to about 600 mg/kg, from about 40 mg/kg to about 400 mg/kg, from about 40 mg/kg to about 200 mg/kg, from about 50 mg/kg to about 100 mg/kg, or any range therein.

[0102] The IL-8 mimetics may be prepared using techniques known in the art. A peptide or polypeptide component of an IL-8 mimetic may be composed, at least in part, of a peptide that has been synthesized, purified, and verified. Receptor agonist activity of the native IL-8 and its mimetics may also be assayed and compared, for example, using standard assay methods. In another example, the peptides and polypeptides may be dimerized through a disulfide bridge formed by gentle oxidation of the cysteines using 10% DMSO in water, purified by HPLC, and verified by mass spectrometry. In another example, one or more modifying groups may be attached to a peptide derived from a native IL-8 by standard methods such as, for example, connecting reactive groups on the amino acid to reactive groups on the modifying groups. Examples of such reactive groups include, but are not limited to, an amino group such as the alpha-amino group at the amino-terminus of a peptide; a carboxyl group at the carboxy terminus of a peptide; a hydroxyl group such as those present on a tyrosine, serine or threonine residue; or, other suitable reactive group on an amino acid side chain.

[0103] The amino acid sequence of the human CXC chemokine IL-8 is as follows:

Human CXC Chemokine IL-8

| | |
|---|---|
| Ala-Val-Ile-Pro-Arg-Ser-Ala-Lys-Glu-Leu-Arg-Cys-Gln-Cys-Ile | 10 |
| Lys-Thr-Tyr-Ser-Lys-Pro-Phe-His-Pro-Lys-Phe-Ile-Lys-Glu-Leu | 25 |
| Arg-Val-IIe-Glu-Ser-Gly-Pro-His-Cys-Ala-Asn-Thr-Glu-IIe-IIe | 40 |
| Val-Lys-Leu-Ser-Asp-Gly-Arg-Glu-Leu-Cys-Leu-Asp-Pro-Lys-Glu | 55 |
| Asn-Trp-Val-Gln-Arg-Val-Val-Glu-Lys-Phe-Leu-Lys-Arg-Ala-Glu | 70 |
| Asn-Ser⁷² | 72 |
| (SEQ ID NO:1). | |

[0104] The human CXC chemokine IL-8 has a total of 77 amino acid residues. The portions of the human CXC chemokine IL-8 that are used to construct each group of IL-8 mimetics are provided in a header preceding each list of analogs. In the embodiments discussed below, the system of numbering the residues is based on a hypothetical “IL-8-1” having 72 residues, in which the first 5 residues of the human CXC chemokine IL-8 are disregarded. Accordingly, the numbering of residues begins at Ser residue 6 of the human CXC chemokine IL-8. For example, the first header, “IL-8-1(1-15),” refers to residues 1 through 15 of the IL-8-1 system of numbering, which corresponds to residues 6 through 20 of the human CXC chemokine IL-8. The human CXC chemokine IL-8 mimetics of the present invention are described herein by their amino acid sequences that are identified by sequence identification numbers SEQ ID NO:9 to SEQ ID NO:162, SEQ ID NO:1641 to SEQ ID NO:1675, variants a155-a342, and conservatively modified variants thereof.

[0105] In some embodiments, the mimetics of human CXC chemokine IL-8 (“the IL-8 mimetics”) correspond to a portion of the N-terminal region of the human CXC chemokine IL-8 and have the following sequences of amino acids:

IL-8-1(1-15)
a 155)

(SEQ ID NO:9)

R_{N}-Ser-Ala-Lys-Glu-Leu-Arg-Cys-Gln-Cys-Ile-Lys-
Thr-Tyr-Ser-Lys-R_{C};
a 156)

(SEQ ID NO:10)

R_{N}-Ser-Ala-Lys-Glu-Leu-Arg-Xaa₁-Gln-Xaa₂-Ile-Lys-
Thr-Tyr-Ser-Lys-R_{C};
a 157)

(SEQ ID NO:11)

R_{N}-Xaa₃-Ala-Lys-Glu-Leu-Arg-Xaa₁-Gln-Xaa₂-Ile-Lys-
Thr-Tyr-Ser-Lys-R_{C};
a 158)

(SEQ ID NO:12)

R_{N}-Ser-Xaa₃-Lys-Glu-Leu-Arg-Xaa₁-Gln-Xaa₂-Ile-Lys-
Thr-Tyr-Ser-Lys-R_{C};
a 159)

(SEQ ID NO:13)

R_{N}-Ser-Ala-Xaa₃-Glu-Leu-Arg-Xaa₁-Gln-Xaa₂-Ile-Lys-
Thr-Tyr-Ser-Lys-R_{C};
IL-8-1(1-13)
a 160)

(SEQ ID NO:14)

R_{N}-Ser-Ala-Lys-Glu-Leu-Arg-Cys-Gln-Cys-Ile-Lys-
Thr-Tyr-R_{C};
a 161)

(SEQ ID NO:15)

R_{N}-Ser-Ala-Lys-Glu-Leu-Arg-Xaa₁-Gln-Xaa₂-Ile-Lys-
Thr-Tyr-R_{C};
a 162)

(SEQ ID NO:16)

R_{N}-Xaa₃-Ala-Lys-Glu-Leu-Arg-Xaa₁-Gln-Xaa₂-Ile-Lys-
Thr-Tyr-R_{C};
a 163)

(SEQ ID NO:17)

R_{N}-Ser-Xaa₃-Lys-Glu-Leu-Arg-Xaa₁-Gln-Xaa₂-Ile-Lys-
Thr-Tyr-R_{C};
a 164)

(SEQ ID NO:18)

R_{N}-Ser-Ala-Xaa₃-Glu-Leu-Arg-Xaa₁-Gln-Xaa₂-Ile-Lys-
Thr-Tyr-R_{C};
IL-8-1(1-11)
a 165)

(SEQ ID NO:19)

R_{N}-Ser-Ala-Lys-Glu-Leu-Arg-Cys-Gln-Cys-Ile-Lys-R_{C};
a 166)

(SEQ ID NO:20)

R_{N}-Ser-Ala-Lys-Glu-Leu-Arg-Xaa₁-Gln-Xaa₂-Ile-Lys-
R_{C};
a 167)

(SEQ ID NO:21)

R_{N}-Xaa₃-Ala-Lys-Glu-Leu-Arg-Xaa₁-Gln-Xaa₂-Ile-
Lys-R_{C};
a 168)

(SEQ ID NO:22)

R_{N}-Ser-Xaa₃-Lys-Glu-Leu-Arg-Xaa₁-Gln-Xaa₂-Ile-Lys-
R_{C};
and
a 169)

(SEQ ID NO:23)

R_{N}-Ser-Ala-Xaa₃-Glu-Leu-Arg-Xaa₁-Gln-Xaa₂-Ile-
Lys-R_{C}.

[0106] In some embodiments, the IL-8 mimetics correspond to a portion of the internal-region of IL-8 and have the following sequences of amino acids:

[A9]-IL-8-1(9-33)
a 170)

(SEQ ID NO:24)

R_{N}-Ala-Ile-Lys-Thr-Tyr-Ser-Lys-Pro-Phe-His-Pro-
Lys-Phe-Ile-Lys-Glu-Leu-Arg-Val-Ile-Glu-Ser-Gly-
Pro-His-R_{C};
and
[A34]-IL-8-1(34-49)
a 171)

(SEQ ID NO:25)

R_{N}-Ala-Ala-Asn-Thr-Glu-lIe-lIe-Val-Lys-Leu-Ser-
Asp-Gly-Arg-Glu-Leu-R_{C}.

[0107] In some embodiments, the IL-8 mimetics correspond to a portion of the C-terminal of IL-8 and have the following sequence of amino acids:

IL-8-1(56-71)
a 172)

SEQ ID NO:26)

R_{N}-Asn-Trp-Val-Gln-Arg-Val-Val-Glu-Lys-Phe-Leu-
Lys-Arg-Ala-Glu-Asn-R_{C}
(residues 6-21 of.

[0108] In some embodiments, the IL-8 mimetics correspond to a portion of the N-terminal joined with a linker to the C-terminal region and have the following sequence of amino acids:

IL-8-1(1-15)-[linker]-IL-8-1(56-71)
a173)

(SEQ ID NO:27)

R_{N}-Ser-Ala-Lys-Glu-Leu-Arg-Cys-Gln-Cys-Ile-Lys-
Thr-Tyr-Ser-Lys-[linker]-Asn-Trp-Val-Gln-Arg-Val-
Val-Glu-Lys-Phe-Leu-Lys-Arg-Ala-Glu-Asn-R_{C};
a174)

(SEQ ID NO:28)

R_{N}-Ser-Ala-Lys-Glu-Leu-Arg-Xaa₁-Gln-Xaa₂-Ile-Lys-
Thr-Tyr-Ser-Lys-[linker]-Asn-Trp-Val-Gln-Arg-Val-
Val-Glu-Lys-Phe-Leu-Lys-Arg-Ala-Glu-Asn-R_{C};
a175)

(SEQ ID NO:29)

R_{N}-Xaa₃-Ala-Lys-Glu-Leu-Arg-Xaa₁-Gln-Xaa₂-Ile-Lys-
Thr-Tyr-Ser-Lys-[linker]-Asn-Trp-Val-Gln-Arg-Val-
Val-Glu-Lys-Phe-Leu-Lys-Arg-Ala-Glu-Asn-R_{C};
a176)

(SEQ ID NO:30)

R_{N}-Ser-Xaa₃-Lys-Glu-Leu-Arg-Xaa₁-Gln-Xaa₂-Ile-Lys-
Thr-Tyr-Ser-Lys-[linker]-Asn-Trp-Val-Gln-Arg-Val-
Val-Glu-Lys-Phe-Leu-Lys-Arg-Ala-Glu-Asn-R_{C};
a177)

(SEQ ID NO:31)

R_{N}-Ser-Ala-Xaa₃-Glu-Leu-Arg-Xaa₁-Gln-Xaa₂-Ile-Lys-
Thr-Tyr-Ser-Lys-[linker]-Asn-Trp-Val-Gln-Arg-Val-
Val-Glu-Lys-Phe-Leu-Lys-Arg-Ala-Glu-Asn-R_{C};
a178)

(SEQ ID NO:32)

R_{N}-Ser-Ala-Lys-Glu-Leu-Arg-Xaa₁-Gln-Xaa₂-Xaa₂-Lys-
Thr-Tyr-Ser-Lys-[linker]-Asn-Trp-Val-Gln-Arg-Val-
Val-Glu-Lys-Phe-Leu-Lys-Arg-Ala-Glu-Asn-R_{C};
a179)

(SEQ ID NO:33)

R_{N}-Xaa₃-Ala-Lys-Glu-Leu-Arg-Xaa₁-Gln-Xaa₂-Xaa₄-
Lys-Thr-Tyr-Ser-Lys-[linker]-Asn-Trp-Val-Gln-Arg-
Val-Val-Glu-Lys-Phe-Leu-Lys-Arg-Ala-Glu-Asn-R_{C}
a180)

(SEQ ID NO:34)

R_{N}-Ser-Xaa₃-Lys-Glu-Leu-Arg-Xaa₁-Gln-Xaa₂-Xaa₄-
Lys-Thr-Tyr-Ser-Lys-[linker]-Asn-Trp-Val-Gln-Arg-
Val-Val-Glu-Lys-Phe-Leu-Lys-Arg-Ala-Glu-Asn-R_{C};
a181)

(SEQ ID NO:35)

R_{N}-Ser-Ala-Xaa₃-Glu-Leu-Arg-Xaa₁-Gln-Xaa₂-Xaa₄-
Lys-Thr-Tyr-Ser-Lys-[linker]-Asn-Trp-Val-Gln-Arg-
Val-Val-Glu-Lys-Phe-Leu-Lys-Arg-Ala-Glu-Asn-R_{C};
a182)

(SEQ ID NO:36)

R_{N}-Ser-Ala-Lys-Glu-Leu-Arg-Xaa₁-Gln-Xaa₂-Ile-Xaa₄-
Thr-Tyr-Ser-Lys-[linker]-Asn-Trp-Val-Gln-Arg-Val-
Val-Glu-Lys-Phe-Leu-Lys-Arg-Ala-Glu-Asn-R_{C};
a183)

(SEQ ID NO:37)

R_{N}-Xaa₃-Ala-Lys-Glu-Leu-Arg-Xaa₁-Gln-Xaa₂-Ile-
Xaa₄-Thr-Tyr-Ser-Lys-[linker]-Asn-Trp-Val-Gln-Arg-
Val-Val-Glu-Lys-Phe-Leu-Lys-Arg-Ala-Glu-Asn-R_{C};
a184)

(SEQ ID NO:38)

R_{N}-Ser-Xaa₃-Lys-Glu-Leu-Arg-Xaa₁-Gln-Xaa₂-Ile-
Xaa₄-Thr-Tyr-Ser-Lys-[linker]-Asn-Trp-Val-Gln-Arg-
Val-Val-Glu-Lys-Phe-Leu-Lys-Arg-Ala-Glu-Asn-R_{C};
a185)

(SEQ ID NO:39)

R_{N}-Ser-Ala-Xaa₃-Glu-Leu-Arg-Xaa₁-Gln-Xaa₂-Ile-
Xaa₄-Thr-Tyr-Ser-Lys-[linker]-Asn-Trp-Val-Gln-Arg-
Val-Val-Glu-Lys-Phe-Leu-Lys-Arg-Ala-Glu-Asn-R_{C};
a186)

(SEQ ID NO:40)

R_{N}-Ser-Ala-Lys-Glu-Leu-Arg-Xaa₁-Gln-Xaa₂-Ile-Lys-
Xaa₄-Tyr-Ser-Lys-[linker]-Asn-Trp-Val-Gln-Arg-Val-
Val-Glu-Lys-Phe-Leu-Lys-Arg-Ala-Glu-Asn-R_{C};
a187)

(SEQ ID NO:41)

R_{N}-Xaa₃-Ala-Lys-Glu-Leu-Arg-Xaa₁-Gln-Xaa₂-Ile-Lys-
Xaa₄-Tyr-Ser-Lys-[linker]-Asn-Trp-Val-Gln-Arg-Val-
Val-Glu-Lys-Phe-Leu-Lys-Arg-Ala-Glu-Asn-R_{C};
a188)

(SEQ ID NO:42)

R_{N}-Ser-Xaa₃-Lys-Glu-Leu-Arg-Xaa₁-Gln-Xaa₂-Ile-Lys-
Xaa₄-Tyr-Ser-Lys-[linker]-Asn-Trp-Val-Gln-Arg-Val-
Val-Glu-Lys-Phe-Leu-Lys-Arg-Ala-Glu-Asn-R_{C};
a189)

(SEQ ID NO:43)

R_{N}-Ser-Ala-Xaa₃-Glu-Leu-Arg-Xaa₁-Gln-Xaa₂-Ile-Lys-
Xaa₄-Tyr-Ser-Lys-[linker]-Asn-Trp-Val-Gln-Arg-Val-
Val-Glu-Lys-Phe-Leu-Lys-Arg-Ala-Glu-Asn-R_{C};
a190)

(SEQ ID NO:44)

R_{N}-Ser-Ala-Lys-Glu-Leu-Arg-Xaa₁-Gln-Xaa₂-Ile-Lys-
Thr-Xaa₄-Ser-Lys-[linker]-Asn-Trp-Val-Gln-Arg-Val-
Val-Glu-Lys-Phe-Leu-Lys-Arg-Ala-Glu-Asn-R_{C};
a191)

(SEQ ID NO:45)

R_{N}-Xaa₃-Ala-Lys-Glu-Leu-Arg-Xaa₁-Gln-Xaa₂-Ile-Lys-
Thr-Xaa₄-Ser-Lys-[linker]-Asn-Trp-Val-Gln-Arg-Val-
Val-Glu-Lys-Phe-Leu-Lys-Arg-Ala-Glu-Asn-R_{C};
a192)

(SEQ ID NO:46)

R_{N}-Ser-Xaa₃-Lys-Glu-Leu-Arg-Xaa₁-Gln-Xaa₂-Ile-Lys-
Thr-Xaa₄-Ser-Lys-[linker]-Asn-Trp-Val-Gln-Arg-Val-
Val-Glu-Lys-Phe-Leu-Lys-Arg-Ala-Glu-Asn-R_{C};
a193)

(SEQ ID NO:47)

R_{N}-Ser-Ala-Xaa₃-Glu-Leu-Arg-Xaa₁-Gln-Xaa₂-Ile-Lys-
Thr-Xaa₄-Ser-Lys-[linker]-Asn-Trp-Val-Gln-Arg-Val-
Val-Glu-Lys-Phe-Leu-Lys-Arg-Ala-Glu-Asn-R_{C};
a194)

(SEQ ID NO:48)

R_{N}-Ser-Ala-Lys-Glu-Leu-Arg-Xaa₁-Gln-Xaa₂-Ile-Lys-
Thr-Tyr-Xaa₄-Lys-[linker]-Asn-Trp-Val-Gln-Arg-Val-
Val-Glu-Lys-Phe-Leu-Lys-Arg-Ala-Glu-Asn-R_{C};
a195)

(SEQ ID NO:49)

R_{N}-Xaa₃-Ala-Lys-Glu-Leu-Arg-Xaa₁-Gln-Xaa₂-Ile-Lys-
Thr-Tyr-Xaa₄-Lys-[linker]-Asn-Trp-Val-Gln-Arg-Val-
Val-Glu-Lys-Phe-Leu-Lys-Arg-Ala-Glu-Asn-R_{C};
a196)

(SEQ ID NO:50)

R_{N}-Ser-Xaa₃-Lys-Glu-Leu-Arg-Xaa₁-Gln-Xaa₂-Ile-Lys-
Thr-Tyr-Xaa₄-Lys-[linker]-Asn-Trp-Val-Gln-Arg-Val-
Val-Glu-Lys-Phe-Leu-Lys-Arg-Ala-Glu-Asn-R_{C};
a197)

(SEQ ID NO:51)

R_{N}-Ser-Ala-Xaa₃-Glu-Leu-Arg-Xaa₁-Gln-Xaa₂-Ile-Lys-
Thr-Tyr-Xaa₄-Lys-[linker]-Asn-Trp-Val-Gln-Arg-Val-
Val-Glu-Lys-Phe-Leu-Lys-Arg-Ala-Glu-Asn-R_{C};
a198)

(SEQ ID NO:52)

R_{N}-Ser-Ala-Lys-Glu-Leu-Arg-Xaa₁-Gln-Xaa₂-Ile-Lys-
Thr-Tyr-Ser-Lys-[linker]-Asn-Trp-Val-Gln-Arg-Val-
Val-Glu-Lys-Phe-Leu-Lys-Arg-Ala-Glu-Asn-R_{C};
a199)

(SEQ ID NO:53)

R_{N}-Xaa₃-Ala-Lys-Glu-Leu-Arg-Xaa₁-Gln-Xaa₂-Ile-Lys-
Thr-Tyr-Ser-Lys-[linker]-Asn-Trp-Val-Gln-Arg-Val-
Val-Glu-Lys-Phe-Leu-Lys-Arg-Ala-Glu-Asn-R_{C};
a200)

(SEQ ID NO:54)

R_{N}-Ser-Xaa₃-Lys-Glu-Leu-Arg-Xaa₁-Gln-Xaa₂-Ile-Lys-
Thr-Tyr-Ser-Lys-[linker]-Asn-Trp-Val-Gln-Arg-Val-
Val-Glu-Lys-Phe-Leu-Lys-Arg-Ala-Glu-Asn-R_{C};
a201)

(SEQ ID NO:55)

R_{N}-Ser-Ala-Xaa₃-Glu-Leu-Arg-Xaa₁-Gln-Xaa₂-Ile-Lys-
Thr-Tyr-Ser-Lys-[linker]-Asn-Trp-Val-Gln-Arg-Val-
Val-Glu-Lys-Phe-Leu-Lys-Arg-Ala-Glu-Asn-R_{C};
IL-8-1(1-13)-[linker]-IL-8-1(56-71)
a202)

(SEQ ID NO:56)

R_{N}-Ser-Ala-Lys-Glu-Leu-Arg-Cys-Gln-Cys-Ile-Lys-
Thr-Tyr-[linker]-Asn-Trp-Val-Gln-Arg-Val-Val-Glu-
Lys-Phe-Leu-Lys-Arg-Ala-Glu-Asn-R_{C};
a203)

(SEQ ID NO:57)

R_{N}-Ser-Ala-Lys-Glu-Leu-Arg-Xaa₁-Gln-Xaa₂-Ile-Lys-
Thr-Tyr-[linker]-Asn-Trp-Val-Gln-Arg-Val-Val-Glu-
Lys-Phe-Leu-Lys-Arg-Ala-Glu-Asn-R_{C};
a204)

(SEQ ID NO:58)

R_{N}-Xaa₃-Ala-Lys-Glu-Leu-Arg-Xaa₁-Gln-Xaa₂-Ile-Lys-
Thr-Tyr-[linker]-Asn-Trp-Val-Gln-Arg-Val-Val-Glu-
Lys-Phe-Leu-Lys-Arg-Ala-Glu-Asn-R_{C};
a205)

(SEQ ID NO:59)

R_{N}-Ser-Xaa₃-Lys-Glu-Leu-Arg-Xaa₁-Gln-Xaa₂-Ile-Lys-
Thr-Tyr-[linker]-Asn-Trp-Val-Gln-Arg-Val-Val-Glu-
Lys-Phe-Leu-Lys-Arg-Ala-Glu-Asn-R_{C};
a206)

(SEQ ID NO:60)

R_{N}-Ser-Ala-Xaa₃-Glu-Leu-Arg-Xaa₁-Gln-Xaa₂-Ile-Lys-
Thr-Tyr-[linker]-Asn-Trp-Val-Gln-Arg-Val-Val-Glu-
Lys-Phe-Leu-Lys-Arg-Ala-Glu-Asn-R_{C};
a207)

(SEQ ID NO:61)

R_{N}-Ser-Ala-Lys-Glu-Leu-Arg-Xaa₁-Gln-Xaa₂-Xaa₄-Lys-
Thr-Tyr-[linker]-Asn-Trp-Val-Gln-Arg-Val-Val-Glu-
Lys-Phe-Leu-Lys-Arg-Ala-Glu-Asn-R_{C};
a208)

(SEQ ID NO:62)

R_{N}-Xaa₃-Ala-Lys-Glu-Leu-Arg-Xaa₁-Gln-Xaa₂-Xaa₄-
Lys-Thr-Tyr-[linker]-Asn-Trp-Val-Gln-Arg-Val-Val-
Glu-Lys-Phe-Leu-Lys-Arg-Ala-Glu-Asn-R_{C};
a209)

(SEQ ID NO:63)

R_{N}-Ser-Xaa₃-Lys-Glu-Leu-Arg-Xaa₁-Gln-Xaa₂-Xaa₄-
Lys-Thr-Tyr-[linker]-Asn-Trp-Val-Gln-Arg-Val-Val-
Glu-Lys-Phe-Leu-Lys-Arg-Ala-Glu-Asn-R_{C};
a210)

(SEQ ID NO:64)

R_{N}-Ser-Ala-Xaa₃-Glu-Leu-Arg-Xaa₁-Gln-Xaa₂-Xaa₄-
Lys-Thr-Tyr-[linker]-Asn-Trp-Val-Gln-Arg-Val-Val-
Glu-Lys-Phe-Leu-Lys-Arg-Ala-Glu-Asn-R_{C};
a211)

(SEQ ID NO:65)

R_{N}-Ser-Ala-Lys-Glu-Leu-Arg-Xaa₁-Gln-Xaa₂-Ile-Xaa₄-
Thr-Tyr-[linker]-Asn-Trp-Val-Gln-Arg-Val-Val-Glu-
Lys-Phe-Leu-Lys-Arg-Ala-Glu-Asn-R_{C};
a212)

(SEQ ID NO:66)

R_{N}-Xaa₃-Ala-Lys-Glu-Leu-Arg-Xaa₁-Gln-Xaa₂-Ile-
Xaa₄-Thr-Tyr-[linker]-Asn-Trp-Val-Gln-Arg-Val-Val-
Glu-Lys-Phe-Leu-Lys-Arg-Ala-Glu-Asn-R_{C};
a213)

(SEQ ID NO:67)

R_{N}-Ser-Xaa₃-Lys-Glu-Leu-Arg-Xaa₁-Gln-Xaa₂-Ile-
Xaa₄-Thr-Tyr-[linker]-Asn-Trp-Val-Gln-Arg-Val-Val-
Glu-Lys-Phe-Leu-Lys-Arg-Ala-Glu-Asn-R_{C};
a214)

(SEQ ID NO:68)

R_{N}-Ser-Ala-Xaa₃-Glu-Leu-Arg-Xaa₁-Gln-Xaa₂-Ile-
Xaa₄-Thr-Tyr-[linker]-Asn-Trp-Val-Gln-Arg-Val-Val-
Glu-Lys-Phe-Leu-Lys-Arg-Ala-Glu-Asn-R_{C};
a215)

(SEQ ID NO:69)

R_{N}-Ser-Ala-Lys-Glu-Leu-Arg-Xaa₁-Gln-Xaa₂-Ile-Lys-
Xaa₄-Tyr-[linker]-Asn-Trp-Val-Gln-Arg-Val-Val-Glu-
Lys-Phe-Leu-Lys-Arg-Ala-Glu-Asn-R_{C};
a216)

(SEQ ID NO:70)

R_{N}-Xaa₃-Ala-Lys-Glu-Leu-Arg-Xaa₁-Gln-Xaa₂-Ile-Lys-
Xaa₄-Tyr-[linker]-Asn-Trp-Val-Gln-Arg-Val-Val-Glu-
Lys-Phe-Leu-Lys-Arg-Ala-Glu-Asn-R_{C};
a217)

(SEQ ID NO:71)

R_{N}-Ser-Xaa₃-Lys-Glu-Leu-Arg-Xaa₁-Gln-Xaa₂-Ile-Lys-
Xaa₄-Tyr-[linker]-Asn-Trp-Val-Gln-Arg-Val-Val-Glu-
Lys-Phe-Leu-Lys-Arg-Ala-Glu-Asn-R_{C};
a218)

(SEQ ID NO:72)

R_{N}-Ser-Ala-Xaa₃-Glu-Leu-Arg-Xaa₁-Gln-Xaa₂-Ile-Lys-
Xaa₄-Tyr-[linker]-Asn-Trp-Val-Gln-Arg-Val-Val-Glu-
Lys-Phe-Leu-Lys-Arg-Ala-Glu-Asn-R_{C};
a219)

(SEQ ID NO:73)

R_{N}-Ser-Ala-Lys-Glu-Leu-Arg-Xaa₁-Gln-Xaa₂-Ile-Lys-
Thr-Xaa₄-[linker]-Asn-Trp-Val-Gln-Arg-Val-Val-Glu-
Lys-Phe-Leu-Lys-Arg-Ala-Glu-Asn-R_{C};
a220)

(SEQ ID NO:74)

R_{N}-Xaa₃-Ala-Lys-Glu-Leu-Arg-Xaa₁-Gln-Xaa₂-Ile-Lys-
Thr-Xaa₄-[linker]-Asn-Trp-Val-Gln-Arg-Val-Val-Glu-
Lys-Phe-Leu-Lys-Arg-Ala-Glu-Asn-R_{C};
a221)

(SEQ ID NO:75)

R_{N}-Ser-Xaa₃-Lys-Glu-Leu-Arg-Xaa₁-Gln-Xaa₂-Ile-Lys-
Thr-Xaa₄-[linker]-Asn-Trp-Val-Gln-Arg-Val-Val-Glu-
Lys-Phe-Leu-Lys-Arg-Ala-Glu-Asn-R_{C};
a222)

(SEQ ID NO:76)

R_{N}-Ser-Ala-Xaa₃-Glu-Leu-Arg-Xaa₁-Gln-Xaa₂-Ile-Lys-
Thr-Xaa₄-[linker]-Asn-Trp-Val-Gln-Arg-Val-Val-Glu-
Lys-Phe-Leu-Lys-Arg-Ala-Glu-Asn-R_{C};
IL-8-1(1-11)-[linker]-IL-8-1(56-71)
a223)

(SEQ ID NO:77)

R_{N}-Ser-Ala-Lys-Glu-Leu-Arg-Cys-Gln-Cys-Ile-Lys-
[linker]-Asn-Trp-Val-Gln-Arg-Val-Val-Glu-Lys-Phe-
Leu-Lys-Arg-Ala-Glu-Asn-R_{C};
a224)

(SEQ ID NO:78)

R_{N}-Ser-Ala-Lys-Glu-Leu-Arg-Xaa₁-Gln-Xaa₂-Ile-Lys-
[linker]-Asn-Trp-Val-Gln-Arg-Val-Val-Glu-Lys-Phe-
Leu-Lys-Arg-Ala-Glu-Asn-R_{C};
a225)

(SEQ ID NO:79)

R_{N}-Xaa₃-Ala-Lys-Glu-Leu-Arg-Xaa₁-Gln-Xaa₂-Ile-Lys-
[linker]-Asn-Trp-Val-Gln-Arg-Val-Val-Glu-Lys-Phe-
Leu-Lys-Arg-Ala-Glu-Asn-R_{C};
a226)

(SEQ ID NO:80)

R_{N}-Ser-Xaa₃-Lys-Glu-Leu-Arg-Xaa₁-Gln-Xaa₂-Ile-Lys-
[linker]-Asn-Trp-Val-Gln-Arg-Val-Val-Glu-Lys-Phe-
Leu-Lys-Arg-Ala-Glu-Asn-R_{C};
a227)

(SEQ ID NO:81)

R_{N}-Ser-Ala-Xaa₃-Glu-Leu-Arg-Xaa₁-Gln-Xaa₂-Ile-Lys-
[linker]-Asn-Trp-Val-Gln-Arg-Val-Val-Glu-Lys-Phe-
Leu-Lys-Arg-Ala-Glu-Asn-R_{C};
a228)

(SEQ ID NO:82)

R_{N}-Ser-Ala-Lys-Glu-Leu-Arg-Xaa₁-Gln-Xaa₂-Xaa₄-Lys-
[linker]-Asn-Trp-Val-Gln-Arg-Val-Val-Glu-Lys-Phe-
Leu-Lys-Arg-Ala-Glu-Asn-R_{C};
a229)

(SEQ ID NO:83)

R_{N}-Xaa₃-Ala-Lys-Glu-Leu-Arg-Xaa₁-Gln-Xaa₂-Xaa₄-
Lys-[linker]-Asn-Trp-Val-Gln-Arg-Val-Val-Glu-Lys-
Phe-Leu-Lys-Arg-Ala-Glu-Asn-R_{C};
a230)

(SEQ ID NO:84)

R_{N}-Ser-Xaa₃-Lys-Glu-Leu-Arg-Xaa₁-Gln-Xaa₂-Xaa₄-
Lys-[linker]-Asn-Trp-Val-Gln-Arg-Val-Val-Glu-Lys-
Phe-Leu-Lys-Arg-Ala-Glu-Asn-R_{C};
a231)

(SEQ ID NO:85)

R_{N}-Ser-Ala-Xaa₃-Glu-Leu-Arg-Xaa₁-Gln-Xaa₂-Xaa₄-
Lys-[linker]-Asn-Trp-Val-Gln-Arg-Val-Val-Glu-Lys-
Phe-Leu-Lys-Arg-Ala-Glu-Asn-R_{C};
a232)

(SEQ ID NO:86)

R_{N}-Ser-Ala-Lys-Glu-Leu-Arg-Xaa₁-Gln-Xaa₂-Ile-Xaa₄-
[linker]-Asn-Trp-Val-Gln-Arg-Val-Val-Glu-Lys-Phe-
Leu-Lys-Arg-Ala-Glu-Asn-R_{C};
a233)

(SEQ ID NO:87)

R_{N}-Xaa₃-Ala-Lys-Glu-Leu-Arg-Xaa₁-Gln-Xaa₂-Ile-
Xaa₄-[linker]-Asn-Trp-Val-Gln-Arg-Val-Val-Glu-Lys-
Phe-Leu-Lys-Arg-Ala-Glu-Asn-R_{C};
a234)

(SEQ ID NO:88)

R_{N}-Ser-Xaa₃-Lys-Glu-Leu-Arg-Xaa₁-Gln-Xaa₂-Ile-
Xaa₄-[linker]-Asn-Trp-Val-Gln-Arg-Val-Val-Glu-Lys-
Phe-Leu-Lys-Arg-Ala-Glu-Asn-R_{C};
a235)

(SEQ ID NO:89)

R_{N}-Ser-Ala-Xaa₃-Glu-Leu-Arg-Xaa₁-Gln-Xaa₂-Ile-
Xaa₁-[linker]-Asn-Trp-Val-Gln-Arg-Val-Val-Glu-Lys-
Phe-Leu-Lys-Arg-Ala-Glu-Asn-R_{C}.

[0109] In some embodiments, the IL-8 mimetics correspond to a cyclic portion of the N-terminal-region of IL-8 and have the following sequences of amino acids:

IL-8-1(1-13)-cyclo-(Xaa₅-Xaa₆)
a236)

(SEQ ID NO:90)

R_{N}-Xaa₅-Ala-Lys-Glu-Leu-Arg-Xaa₁-Gln-Xaa₂-Ile-Lys-
Thr-Xaa₆-R_{C};
a237)

(SEQ ID NO:91)

R_{N}-Xaa₅-Xaa₃-Lys-Glu-Leu-Arg-Xaa₁-Gln-Xaa₂-Ile-
Lys-Thr-Xaa₆-R_{C};
and
a238)

(SEQ ID NO:92)

R_{N}-Xaa₅-Ala-Xaa₃-Glu-Leu-Arg-Xaa₁-Gln-Xaa₂-Ile-
Lys-Thr-Xaa₆-R_{C}.

[0110] In some embodiments, the IL-8 mimetics correspond to a cyclic portion of the internal-region of IL-8 and have the following sequences of amino acids (the underlined residues below are cyclized):

IL-8-1(1-13)-cyclo-(Xaa₅-Xaa₆)
a239)

(SEQ ID NO:93)

R_{N}-Xaa₅-Ile-Lys-Thr-Tyr-Ser-Lys-Pro-Phe-His-Pro-
Lys-Phe-Ile-Lys-Glu-Leu-Arg-Val-Ile-Glu-Ser-Gly-
Pro-His-Xaa₆-R_{C};
and
IL-8-1(34-50)-cyclo-(Xaa₅-Xaa₆)
a240)

(SEQ ID NO:94)

R_{N}-Xaa₅-Ala-Asn-Thr-Glu-Ile-Ile-Val-Lys-Leu-Ser-
Asp-Gly-Arg-Glu-Leu-Xaa₆-R_{C}.

[0111] In some embodiments, the IL-8 mimetics correspond to a cyclic portion of the C-terminal region of IL-8 and have the following sequences of amino acids (the underlined residues below are cyclized):

IL-8-1(50-72)-cyclo-(Xaa₅-Xaa₆)
a241)

(SEQ ID NO:95)

R_{N}-Xaa₅-Leu-Asp-Pro-Lys-Glu-Asn-Trp-Val-Gln-Arg-
Val-Val-Glu-Lys-Phe-Leu-Lys-Arg-Ala-Glu-Asn-Xaa₆-
R_{C};
IL-8-1(80-72)-cyclo-(Glu-⁶³-Lys-⁶⁷)
a242)

(SEQ ID NO:96)

R_{N}-Ala-Leu-Asp-Pro-Lys-Glu-Asn-Trp-Val-Gln-Arg-
Val-Val-Glu-Lys-Phe-Leu-Lys-Arg-Ala-Glu-Asn-Ser-
R_{C};
IL-8-1(50-72)-cyclo-(Lys-⁶⁷-Glu-⁷⁰)
a243)

(SEQ ID NO:97)

R_{N}-Ala-Leu-Asp-Pro-Lys-Glu-Asn-Trp-Val-Gln-Arg-
Val-Val-Glu-Lys-Phe-Leu-Lys-Arg-Ala-Glu-Asn-Ser-
R_{C};
and
IL-8-1(50-72)-cyclo-(Lys-⁶⁴-Glu-70)
a244)

(SEQ ID NO:98)

R_{N}-Ala-Leu-Asp-Pro-Lys-Glu-Asn-Trp-Val-Gln-Arg-
Val-Val-Glu-Lys-Phe-Leu-Lys-Arg-Ala-Glu-Asn-Ser-
R_{C}.

[0112] In some embodiments, the IL-8 mimetics correspond to a portion the N-terminal region joined with a linker to a cyclic portion of the C-terminal region of IL-8 and have the following sequences of amino acids (the underlined residues below are cyclized):

IL-8-1(1-15)-[linker]-IL-8-1(56-71)-
cyclo-(Glu-⁶³-Lys⁶⁷)
a245)

(SEQ ID NO:100)

R_{N}-Ser-Ala-Lys-Glu-Leu-Arg-Cys-Gln-Cys-Ile-Lys-
Thr-Tyr-Ser-Lys-[linker]-Asn-Trp-Val-Gln-Arg-Val-
Val-Glu-Lys-Phe-Leu-Lys-Arg-Ala-Glu-Asn-R_{C};
a246)

(SEQ ID NO:101)

R_{N}-Ser-Ala-Lys-Glu-Leu-Arg-Xaa₁-Ile-Lys-Thr-Tyr-
Ser-Lys-[linker]-Asn-Trp-Val-Gln-Arg-Val-Val-Glu-
Lys-Phe-Leu-Lys-Arg-Ala-Glu-Asn-R_{C};
a247)

(SEQ ID NO:102)

R_{N}-Xaa₃-Ala-Lys-Glu-Leu-Arg-Xaa₁-Gln-Xaa₂-Ile-Lys-
Thr-Tyr-Ser-Lys-[linker]-Asn-Trp-Val-Gln-Arg-Val-
Val-Glu-Lys-Phe-Leu-Lys-Arg-Ala-Glu-Asn-R_{C};
a248)

(SEQ ID NO:103)

R_{N}-Ser-Xaa₃-Lys-Glu-Leu-Arg-Xaa₁-Gln-Xaa₂-Ile-Lys-
Thr-Tyr-Ser-Lys-[linker]-Asn-Trp-Val-Gln-Arg-Val-
Val-Glu-Lys-Phe-Leu-Lys-Arg-Ala-Glu-Asn-R_{C};
a249)

(SEQ ID NO:104)

R_{N}-Ser-Ala-Xaa₃-Glu-Leu-Arg-Xaa₁-Gln-Xaa₂-Ile-Lys-
Thr-Tyr-Ser-Lys-[linker]-Asn-Trp-Val-Gln-Arg-Val-
Val-Glu-Lys-Phe-Leu-Lys-Arg-Ala-Glu-Asn-R_{C};
a250)

(SEQ ID NO:105)

R_{N}-Ser-Ala-Lys-Glu-Leu-Arg-Xaa₁-Gln-Xaa₂-Xaa₄-Lys-
Thr-Tyr-Ser-Lys-[linker]-Asn-Trp-Val-Gln-Arg-Val-
Val-Glu-Lys-Phe-Leu-Lys-Arg-Ala-Glu-Asn-R_{C};
a251)

(SEQ ID NO:106)

R_{N}-Xaa₃-Ala-Lys-Glu-Leu-Arg-Xaa₁-Gln-Xaa₂-Xaa₄-
Lys-Thr-Tyr-Ser-Lys-[linker]-Asn-Trp-Val-Gln-Arg-
Val-Val-Glu-Lys-Phe-Leu-Lys-Arg-Ala-Glu-Asn-R_{C};
a252)

(SEQ ID NO:107)

R_{N}-Ser-Xaa₃-Lys-Glu-Leu-Arg-Xaa₁-Gln-Xaa₂-Xaa₄-
Lys-Thr-Tyr-Ser-Lys-[linker]-Asn-Trp-Val-Gln-Arg-
Val-Val-Glu-Lys-Phe-Leu-Lys-Arg-Ala-Glu-Asn-R_{C};
a253)

(SEQ ID NO:108)

R_{N}-Ser-Ala-Xaa₃-Glu-Leu-Arg-Xaa₁-Gln-Xaa₂-Xaa₄-
Lys-Thr-Tyr-Ser-Lys-[linker]-Asn-Trp-Val-Gln-Arg-
Val-Val-Glu-Lys-Phe-Leu-Lys-Arg-Ala-Glu-Asn-R_{C};
a254)

(SEQ ID NO:109)

R_{N}-Ser-Ala-Lys-Glu-Leu-Arg-Xaa₁-Gln-Xaa₂-Ile-Xaa₄-
Thr-Tyr-Ser-Lys-[linker]-Asn-Trp-Val-Gln-Arg-Val-
Val-Glu-Lys-Phe-Leu-Lys-Arg-Ala-Glu-Asn-R_{C};
a255)

(SEQ ID NO:110)

R_{N}-Xaa₃-Ala-Lys-Glu-Leu-Arg-Xaa₁-Gln-Xaa₂-Ile-
Xaa₄-Thr-Tyr-Ser-Lys-[linker]-Asn-Trp-Val-Gln-Arg-
Val-Val-Glu-Lys-Phe-Leu-Lys-Arg-Ala-Glu-Asn-R_{C};
a256)

(SEQ ID NO:111)

R_{N}-Ser-Xaa₃-Lys-Glu-Leu-Arg-Xaa₁-Gln-Xaa₂-Ile-
Xaa₄-Thr-Tyr-Ser-Lys-[linker]-Asn-Trp-Val-Gln-
Arg-Val-Val-Glu-Lys-Phe-Leu-Lys-Arg-Ala-Glu-Asn-
R_{C};
a257)

(SEQ ID NO:112)

R_{N}-Ser-Ala-Xaa₃-Glu-Leu-Arg-Xaa₁-Gln-Xaa₂-Ile-
Xaa₄-Thr-Tyr-Ser-Lys-[linker]-Asn-Trp-Val-Gln-Arg-
Val-Val-Glu-Lys-Phe-Leu-Lys-Arg-Ala-Glu-Asn-R_{C};
a258)

(SEQ ID NO:113)

R_{N}-Ser-Ala-Lys-Glu-Leu-Arg-Xaa₁-Gln-Xaa₂-Ile-Lys-
Xaa₄-Tyr-Ser-Lys-[linker]-Asn-Trp-Val-Gln-Arg-Val-
Val-Glu-Lys-Phe-Leu-Lys-Arg-Ala-Glu-Asn-R_{C};
a259)

(SEQ ID NO:114)

R_{N}-Xaa₃-Ala-Lys-Glu-Leu-Arg-Xaa₁-Gln-Xaa₂-Ile-Lys-
Xaa₄-Tyr-Ser-Lys-[linker]-Asn-Trp-Val-Gln-Arg-Val-
Val-Glu-Lys-Phe-Leu-Lys-Arg-Ala-Glu-Asn-R_{C};
a260)

(SEQ ID NO:115)

R_{N}-Ser-Xaa₃-Lys-Glu-Leu-Arg-Xaa₁-Gln-Xaa₂-Ile-Lys-
Xaa₄-Tyr-Ser-Lys-[linker]-Asn-Trp-Val-Gln-Arg-Val-
Val-Glu-Lys-Phe-Leu-Lys-Arg-Ala-Glu-Asn-R_{C};
a261)

(SEQ ID NO:116)

R_{N}-Ser-Ala-Xaa₃-Glu-Leu-Arg-Xaa₁-Gln-Xaa₂-Ile-Lys-
Xaa₄-Tyr-Ser-Lys-[linker]-Asn-Trp-Val-Gln-Arg-Val-
Val-Glu-Lys-Phe-Leu-Lys-Arg-Ala-Glu-Asn-R_{C};
a262)

(SEQ ID NO:117)

R_{N}-Ser-Ala-Lys-Glu-Leu-Arg-Xaa₁-Gln-Xaa₂-Ile-Lys-
Thr-Xaa₄-Ser-Lys-[linker]-Asn-Trp-Val-Gln-Arg-Val-
Val-Glu-Lys-Phe-Leu-Lys-Arg-Ala-Glu-Asn-R_{C};
a263)

(SEQ ID NO:118)

R_{N}-Xaa₃-Ala-Lys-Glu-Leu-Arg-Xaa₁-Gln-Xaa₂-Ile-Lys-
Thr-Xaa₄-Ser-Lys-[linker]-Asn-Trp-Val-Gln-Arg-Val-
Val-Glu-Lys-Phe-Leu-Lys-Arg-Ala-Glu-Asn-R_{C};
a264)

(SEQ ID NO:119)

R_{N}-Ser-Xaa₃-Lys-Glu-Leu-Arg-Xaa₁-Gln-Xaa₂-Ile-Lys-
Thr-Xaa₄-Ser-Lys-[linker]-Asn-Trp-Val-Gln-Arg-Val-
Val-Glu-Lys-Phe-Leu-Lys-Arg-Ala-Glu-Asn-R_{C};
a265)

(SEQ ID NO:120)

R_{N}-Ser-Ala-Xaa₃-Glu-Leu-Arg-Xaa₁-Gln-Xaa₂-Ile-Lys-
Thr-Xaa₄-Ser-Lys-[linker]-Asn-Trp-Val-Gln-Arg-Val-
Val-Glu-Lys-Phe-Leu-Lys-Arg-Ala-Glu-Asn-R_{C};
a266)

(SEQ ID NO:121)

R_{N}-Ser-Ala-Lys-Glu-Leu-Arg-Xaa₁-Gln-Xaa₂-Ile-Lys-
Thr-Tyr-Xaa₄-Lys-[linker]-Asn-Trp-Val-Gln-Arg-Val-
Val-Glu-Lys-Phe-Leu-Lys-Arg-Ala-Glu-Asn-R_{C};
a267)

(SEQ ID NO:122)

R_{N}-Xaa₃-Ala-Lys-Glu-Leu-Arg-Xaa₁-Gln-Xaa₂-Ile-Lys-
Thr-Tyr-Xaa₄-Lys-[linker]-Asn-Trp-Val-Gln-Arg-Val-
Val-Glu-Lys-Phe-Leu-Lys-Arg-Ala-Glu-Asn-R_{C};
a268)

(SEQ ID NO:123)

R_{N}-Ser-Xaa₃-Lys-Glu-Leu-Arg-Xaa₁-Gln-Xaa₂-Ile-Lys-
Thr-Tyr-Xaa₄-Lys-[linker]-Asn-Trp-Val-Gln-Arg-Val-
Val-Glu-Lys-Phe-Leu-Lys-Arg-Ala-Glu-Asn-R_{C};
a269)

(SEQ ID NO:124)

R_{N}-Ser-Ala-Xaa₃-Glu-Leu-Arg-Xaa₁-Gln-Xaa₂-Ile-Lys-
Thr-Tyr-Xaa₄-Lys-[linker]-Asn-Trp-Val-Gln-Arg-Val-
Val-Glu-Lys-Phe-Leu-Lys-Arg-Ala-Glu-Asn-R_{C};
a270)

(SEQ ID NO:125)

R_{N}-Ser-Ala-Lys-Glu-Leu-Arg-Xaa₁-Gln-Xaa₂-Ile-Lys-
Thr-Tyr-Ser-Xaa₄-[linker]-Asn-Trp-Val-Gln-Arg-Val-
Val-Glu-Lys-Phe-Leu-Lys-Arg-Ala-Glu-Asn-R_{C};
a271)

(SEQ ID NO:126)

R_{N}-Xaa₃-Ala-Lys-Glu-Leu-Arg-Xaa₁-Gln-Xaa₂-Ile-Lys-
Thr-Tyr-Ser-Xaa₄-[linker]-Asn-Trp-Val-Gln-Arg-Val-
Val-Glu-Lys-Phe-Leu-Lys-Arg-Ala-Glu-Asn-R_{C};
a272)

(SEQ ID NO:127)

R_{N}-Ser-Xaa₃-Lys-Glu-Leu-Arg-Xaa₁-Gln-Xaa₂-Ile-Lys-
Thr-Tyr-Ser-Xaa₄-[linker]-Asn-Trp-Val-Gln-Arg-Val-
Val-Glu-Lys-Phe-Leu-Lys-Arg-Ala-Glu-Asn-R_{C};
a2473)

(SEQ ID NO:128)

R_{N}-Ser-Ala-Xaa₃-Glu-Leu-Arg-Xaa₁-Gln-Xaa₂-Ile-Lys-
Thr-Tyr-Ser-Xaa₄-[linker]-Asn-Trp-Val-Gln-Arg-Val-
Val-Glu-Lys-Phe-Leu-Lys-Arg-Ala-Glu-Asn-R_{C};
IL-8-1(1-13)-[linker]-IL-8-1(56-71)-cyclo-
(Glu-⁶³-Lys-⁶⁷)
a274)

(SEQ ID NO:129)

R_{N}-Ser-Ala-Lys-Glu-Leu-Arg-Cys-Gln-Cys-Ile-Lys-
Thr-Tyr-[linker]-Asn-Trp-Val-Gln-Arg-Val-Val-Glu-
Lys-Phe-Leu-Lys-Arg-Ala-Glu-Asn-R_{C};
a275)

(SEQ ID NO:130)

R_{N}-Ser-Ala-Lys-Glu-Leu-Arg-Xaa₁-Gln-Xaa₂-Ile-Lys-
Thr-Tyr-[linker]-Asn-Trp-Val-Gln-Arg-Val-Val-Glu-
Lys-Phe-Leu-Lys-Arg-Ala-Glu-Asn-R_{C};
a276)

(SEQ ID NO:131)

R_{N}-Xaa₃-Ala-Lys-Glu-Leu-Arg-Xaa₁-Gln-Xaa₂-Ile-Lys-
Thr-Tyr-[linker]-Asn-Trp-Val-Gln-Arg-Val-Val-Glu-
Lys-Phe-Leu-Lys-Arg-Ala-Glu-Asn-R_{C};
a277)

(SEQ ID NO:132)

R_{N}-Ser-Xaa₃-Lys-Glu-Leu-Arg-Xaa₁-Gln-Xaa₂-Ile-Lys-
Thr-Tyr-[linker]-Asn-Trp-Val-Gln-Arg-Val-Val-Glu-
Lys-Phe-Leu-Lys-Arg-Ala-Glu-Asn-R_{C};
a278)

(SEQ ID NO:133)

R_{N}-Ser-Ala-Xaa₃-Glu-Leu-Arg-Xaa₁-Gln-Xaa₂-Ile-Lys-
Thr-Tyr-[linker]-Asn-Trp-Val-Gln-Arg-Val-Val-Glu-
Lys-Phe-Leu-Lys-Arg-Ala-Glu-Asn-R_{C};
a279)

(SEQ ID NO:134)

R_{N}-Ser-Ala-Lys-Glu-Leu-Arg-Xaa₁-Gln-Xaa₂-Xaa₄-Lys-
Thr-Tyr-[linker]-Asn-Trp-Val-Gln-Arg-Val-Val-Glu-
Lys-Phe-Leu-Lys-Arg-Ala-Glu-Asn-R_{C};
a280)

(SEQ ID NO:135)

R_{N}-Xaa₃-Ala-Lys-Glu-Leu-Arg-Xaa₁-Gln-Xaa₂-Xaa₄-
Lys-Thr-Tyr-[linker]-Asn-Trp-Val-Gln-Arg-Val-Val-
Glu-Lys-Phe-Leu-Lys-Arg-Ala-Glu-Asn-R_{C};
a281)

(SEQ ID NO:136)

R_{N}-Ser-Xaa₃-Lys-Glu-Leu-Arg-Xaa₁-Gln-Xaa₂-Xaa₄-
Lys-Thr-Tyr-[linker]-Asn-Trp-Val-Gln-Arg-Val-Val-
Glu-Lys-Phe-Leu-Lys-Arg-Ala-Glu-Asn-R_{C};
a282)

(SEQ ID NO:137)

R_{N}-Ser-Ala-Xaa₃-Glu-Leu-Arg-Xaa₁-Gln-Xaa₂-Xaa₄-
Lys-Thr-Tyr-[linker]-Asn-Trp-Val-Gln-Arg-Val-Val-
Glu-Lys-Phe-Leu-Lys-Arg-Ala-Glu-Asn-R_{C};
a283)

(SEQ ID NO:138)

R_{N}-Ser-Ala-Lys-Glu-Leu-Arg-Xaa₁-Gln-Xaa₂-Ile-Xaa₄-
Thr-Tyr-[linker]-Asn-Trp-Val-Gln-Arg-Val-Val-Glu-
Lys-Phe-Leu-Lys-Arg-Ala-Glu-Asn-R_{C};
a284)

(SEQ ID NO:139)

R_{N}-Xaa₃-Ala-Lys-Glu-Leu-Arg-Xaa₁-Gln-Xaa₂-Ile-
Xaa₄-Thr-Tyr-[linker]-Asn-Trp-Val-Gln-Arg-Val-Val-
Glu-Lys-Phe-Leu-Lys-Arg-Ala-Glu-Asn-R_{C};
a285)

(SEQ ID NO:140)

R_{N}-Ser-Xaa₃-Lys-Glu-Leu-Arg-Xaa₁-Gln-Xaa₂-Ile-
Xaa₄-Thr-Tyr-[linker]-Asn-Trp-Val-Gln-Arg-Val-Val-
Glu-Lys-Phe-Leu-Lys-Arg-Ala-Glu-Asn-R_{C};
a286)

(SEQ ID NO:141)

R_{N}-Ser-Ala-Xaa₃-Glu-Leu-Arg-Xaa₁-Gln-Xaa₂-Ile-
Xaa₄-Thr-Tyr-[linker]-Asn-Trp-Val-Gln-Arg-Val-Val-
Glu-Lys-Phe-Leu-Lys-Arg-Ala-Glu-Asn-R_{C};
a287)

(SEQ ID NO:142)

R_{N}-Ser-Ala-Lys-Glu-Leu-Arg-Xaa₁-Gln-Xaa₂-Ile-Lys-
Xaa₄-Tyr-[linker]-Asn-Trp-Val-Gln-Arg-Val-Val-Glu-
Lys-Phe-Leu-Lys-Arg-Ala-Glu-Asn-R_{C};
a288)

(SEQ ID NO:143)

R_{N}-Xaa₃-Ala-Lys-Glu-Leu-Arg-Xaa₁-Gln-Xaa₂-Ile-Lys-
Xaa₄-Tyr-[linker]-Asn-Trp-Val-Gln-Arg-Val-Val-Glu-
Lys-Phe-Leu-Lys-Arg-Ala-Glu-Asn-R_{C};
a289)

(SEQ ID NO:144)

R_{N}-Ser-Xaa₃-Lys-Glu-Leu-Arg-Xaa₁-Gln-Xaa₂-Ile-Lys-
Xaa₄-Tyr-[linker]-Asn-Trp-Val-Gln-Arg-Val-Val-Glu-
Lys-Phe-Leu-Lys-Arg-Ala-Glu-Asn-R_{C};
a290)

(SEQ ID NO:145)

R_{N}-Ser-Ala-Xaa₃-Glu-Leu-Arg-Xaa₁-Gln-Xaa₂-Ile-Lys-
Xaa₄-Tyr-[linker]-Asn-Trp-Val-Gln-Arg-Val-Val-Glu-
Lys-Phe-Leu-Lys-Arg-Ala-Glu-Asn-R_{C};
a291)

(SEQ ID NO:146)

R_{N}-Ser-Ala-Lys-Glu-Leu-Arg-Xaa₁-Gln-Xaa₂-Ile-Lys-
Thr-Xaa₄-[linker]-Asn-Trp-Val-Gln-Arg-Val-Val-Glu-
Lys-Phe-Leu-Lys-Arg-Ala-Glu-Asn-R_{C};
a292)

(SEQ ID NO:147)

R_{N}-Xaa₃-Ala-Lys-Glu-Leu-Arg-Xaa₁-Gln-Xaa₂-Ile-Lys-
Thr-Xaa₄-[linker]-Asn-Trp-Val-Gln-Arg-Val-Val-Glu-
Lys-Phe-Leu-Lys-Arg-Ala-Glu-Asn-R_{C};
a293)

(SEQ ID NO:148)

R_{N}-Ser-Xaa₃-Lys-Glu-Leu-Arg-Xaa₁-Gln-Xaa₂-Ile-Lys-
Thr-Xaa₄-[linker]-Asn-Trp-Val-Gln-Arg-Val-Val-Glu-
Lys-Phe-Leu-Lys-Arg-Ala-Glu-Asn-R_{C};
a294)

(SEQ ID NO:149)

R_{N}-Ser-Ala-Xaa₃-Glu-Leu-Arg-Xaa₁-Gln-Xaa₂-Ile-Lys-
Thr-Xaa₄-[linker]-Asn-Trp-Val-Gln-Arg-Val-Val-Glu-
Lys-Phe-Leu-Lys-Arg-Ala-Glu-Asn-R_{C};
IL-8-1(1-11)-[linker]-IL-8-(56-71)-cyclo-
(Glu-⁶³-Lys-⁶⁷)
a295)

(SEQ ID NO:150)

R_{N}-Ser-Ala-Lys-Glu-Leu-Arg-Cys-Gln-Cys-Ile-Lys-
[linker]-Asn-Val-Gln-Arg-Val-Val-Glu-Lys-Phe-Leu-
Lys-Arg-Ala-Glu-Asn-R_{C};
a296)

(SEQ ID NO:151)

R_{N}-Ser-Ala-Lys-Glu-Leu-Arg-Xaa₁-Gln-Xaa₂-Ile-Lys-
[linker]-Asn-Trp-Val-Gln-Arg-Val-Val-Glu-Lys-Phe-
Leu-Lys-Arg-Ala-Glu-Asn-R_{C};
a297)

(SEQ ID NO:152)

R_{N}-Xaa₃-Ala-Lys-Glu-Leu-Arg-Xaa₁-Gln-Xaa₂-Ile-Lys-
[linker]-Asn-Trp-Val-Gln-Arg-Val-Val-Glu-Lys-Phe-
Leu-Lys-Arg-Ala-Glu-Asn-R_{C};
a298)

(SEQ ID NO:153)

R_{N}-Ser-Xaa₃-Lys-Glu-Leu-Arg-Xaa₁-Gln-Xaa₂-Ile-Lys-
[linker]-Asn-Trp-Val-Gln-Arg-Val-Val-Glu-Lys-Phe-
Leu-Lys-Arg-Ala-Glu-Asn-R_{C};
a299)

(SEQ ID NO:154)

R_{N}-Ser-Ala-Xaa₃-Glu-Leu-Arg-Xaa₁-Gln-Xaa₂-Ile-Lys-
[linker]-Asn-Trp-Val-Gln-Arg-Val-Val-Glu-Lys-Phe-
Leu-Lys-Arg-Ala-Glu-Asn-R_{C};
a300)

(SEQ ID NO:155)

R_{N}-Ser-Ala-Lys-Glu-Leu-Arg-Xaa₁-Gln-Xaa₂-Xaa₄-Lys-
[linker]-Asn-Trp-Val-Gln-Arg-Val-Val-Glu-Lys-Phe-
Leu-Lys-Arg-Ala-Glu-Asn-R_{C};
a301)

(SEQ ID NO:156)

R_{N}-Xaa₃-Ala-Lys-Glu-Leu-Arg-Xaa₁-Gln-Xaa₂-Xaa₄-
Lys-[linker]-Asn-Trp-Val-Gln-Arg-Val-Val-Glu-Lys-
Phe-Leu-Lys-Arg-Ala-Glu-Asn-R_{C};
a302)

(SEQ ID NO:157)

R_{N}-Ser-Xaa₃-Lys-Glu-Leu-Arg-Xaa₁-Gln-Xaa₂-Xaa₄-
Lys-[linker]-Asn-Trp-Val-Gln-Arg-Val-Val-Glu-Lys-
Phe-Leu-Lys-Arg-Ala-Glu-Asn-R_{C};
a303)

(SEQ ID NO:158)

R_{N}-Ser-Ala-Xaa₃-Glu-Leu-Arg-Xaa₁-Gln-Xaa₂-Xaa₄-
Lys-[linker]-Asn-Trp-Val-Gln-Arg-Val-Val-Glu-Lys-
Phe-Leu-Lys-Arg-Ala-Glu-Asn-R_{C};
a304)

(SEQ ID NO:159)

R_{N}-Ser-Ala-Xaa₃-Glu-Leu-Arg-Xaa₁-Gln-Xaa₂-Xaa₄-
Lys-[linker]-Asn-Trp-Val-Gln-Arg-Val-Val-Glu-Lys-
Phe-Leu-Lys-Arg-Ala-Glu-Asn-R_{C};
a305)

(SEQ ID NO:160)

R_{N}-Xaa₃-Ala-Xaa₃-Glu-Leu-Arg-Xaa₁-Gln-Xaa₂-Xaa₄-
Lys-[linker]-Asn-Trp-Val-Gln-Arg-Val-Val-Glu-Lys-
Phe-Leu-Lys-Arg-Ala-Glu-Asn-R_{C};
a306)

(SEQ ID NO:161)

R_{N}-Ser-Xaa₃-Lys-Glu-Leu-Arg-Xaa₁-Gln-Xaa₂-Ile-
Xaa₄-[linker]-Asn-Trp-Val-Gln-Arg-Val-Val-Glu-
Lys-Phe-Leu-Lys-Arg-Ala-Glu-Asn-R_{C};
a307)

(SEQ ID NO:162)

R_{N}-Ser-Ala-Xaa₃-Glu-Leu-Arg-Xaa₁-Gln-Xaa₂-Ile-
Xaa₄-[linker]-Asn-Trp-Val-Gln-Arg-Val-Val-Glu-Lys-
Phe-Leu-Lys-Arg-Ala-Glu-Asn-R_{C}.

[0113] In some embodiments, the IL-8 mimetics can be specifically defined and have the following sequences of amino acids:

IL-8-1(1-15)-NH₂
a308)

(SEQ ID NO:1641)

H-Ser-Ala-Lys-Glu-Leu-Arg-Cys-Gln-Cys-Ile-Thr-Tyr-
Ser-Lys-NH₂;
IL-8-1(56-71)-NH-₂
a309)

(SEQ ID NO:1642)

H-Asn-Trp-Val-Gln-Arg-Val-Val-Glu-Lys-Phe-Leu-Lys-
Arg-Ala-Glu-Asn-NH₂;
IL-8-1(1-11)-[Gly]₄-IL-8-1(56-71)-NH₂
a310)

(SEQ ID NO:1643)

H-Ser-Ala-Lys-Glu-Leu-Arg-Cys-Gln-Cys-Ile-Lys-
[Gly]₄-Asn-Trp-Val-Gln-Arg-Val-Val-Glu-Lys-
Phe-Leu-Lys-Arg-Ala-Glu-Asn-NH₂;
IL-8-1(1-13)-[Gly]₄-IL-8-1(56-71)-NH₂
a311)

(SEQ ID NO:1644)

H-Ser-Ala-Lys-Glu-Leu-Arg-Cys-Gln-Cys-Ile-Lys-Thr-
Tyr-[Gly]₄-Asn-Trp-Val-Gln-Arg-Val-Val-Glu-
Lys-Phe-Leu-Lys-Arg-Ala-Glu-Asn-NH₂;
IL-8-1(1-15)-[Gly]₄-IL-8-1(56-71)-NH₂
a312)

(SEQ ID NO:1645)

H-Ser-Ala-Lys-Glu-Leu-Arg-Cys-Gln-Cys-Ile-Lys-Thr-
Tyr-Ser-Lys-[Gly]₄-Asn-Trp-Val-Gln-Arg-Val-
Val-Glu-Lys-Phe-Leu-Lys-Arg-Ala-Glu-Asn-NH₂;
IL-8-1(1-15)-[linker]-IL-8-1(56-71)-NH-₂
a313)

(SEQ ID NO:1646)

H-Ser-Ala-Lys-Glu-Leu-Arg-Cys-Gln-Cys-Ile-Lys-Thr-
Tyr-Ser-Lys-[11-aminoudecanoic acid]-Asn-Trp-Val-
Gln-Arg-Val-Val-Glu-Lys-Phe-Leu-Lys-Arg-Ala-Glu-
Asn-NH₂;
[Ala⁷, Phe⁹[-IL-8-1(1-15)-[linker]-
IL-8-1(56-71)-NH₂
a314)

(SEQ ID NO:1647)

H-Ser-Ala-Lys-Glu-Leu-Arg-Ala-Gln-Phe-Ile-Lys-Thr-
Tyr-Ser-Lys-[11-aminoudecanoic acid]-Asn-Trp-Val-
Gln-Arg-Val-Val-Glu-Lys-Phe-Leu-Lys-Arg-Ala-Glu-
Asn-NH₂;
[Ala⁷, Phe⁹[-IL-8-1(1-15)-
[linker]-IL-8-1(56-71)-NH₂
a315)

(SEQ ID NO:1648)

H-Ser-Ala-Lys-Glu-Leu-Arg-Ala-Gln-Phe-Ile-Lys-Thr-
Tyr-Ser-Lys-[8-amino-3,6-dioxoctanoic acid]-Asn-
Trp-Val-Gln-Arg-Val-Val-Glu-Lys-Phe-Leu-Lys-Arg-
Ala-Glu-Asn-NH₂;
[Ser⁷, Ser⁹]-IL-8-1(1-15)-
[linker]-IL-8-1(56-71)-NH₂
a316)

(SEQ ID NO:1649)

H-Ser-Ala-Lys-Glu-Leu-Arg-Ala-Gln-Phe-Ile-Lys-Thr-
Tyr-Ser-Lys-[11-aminoudecanoic acid]-Asn-Trp-Val-
Gln-Arg-Val-Val-Glu-Lys-Phe-Leu-Lys-Arg-Ala-Glu-
Asn-NH₂;
Ac-[Ala⁷, Phe⁹]-Il-8-1(1-15)-
[linker]-IL-8-1(56-71)-NH₂
a317)

(SEQ ID NO:1650)

H-Ser-Ala-Lys-Glu-Leu-Arg-Ala-Gln-Phe-Ile-Lys-Thr-
Tyr-Ser-Lys-[11-aminoudecanoic acid]-Asn-Trp-Val-
Gln-Arg-Val-Val-Glu-Lys-Phe-Leu-Lys-Arg-Ala-Glu-
Asn-NH₂;
Ac-[Ser⁷, Ser⁹]-IL-8-1(1-15)-
[linker]-IL-8-1(56-71 -NH₂
a318)

(SEQ ID NO:1651)

H-Ser-Ala-Lys-Glu-Leu-Arg-Ala-Gln-Phe-Ile-Lys-Thr-
Tyr-Ser-Lys-[11-aminoudecanoic acid]-Asn-Trp-Val-
Gln-Arg-Val-Val-Glu-Lys-Phe-Leu-Lys-Arg-Ala-Glu-
Asn-NH₂;
[Ala⁷, Phe⁹]-Il-8-1(1-15)-
[linker]-IL-8-1(56-71)-NH₂
a319)

(SEQ ID NO:1652)

H-Ser-Ala-Lys-Glu-Leu-Arg-Ala-Gln-Phe-Ile-Lys-Thr-
Tyr-Ser-Lys-[11-aminoudecanoic acid]-Asn-Trp-Val-
Gln-Arg-Val-Val-Glu-Lys-Phe-Leu-Lys-Arg-Ala-Glu-
Asn-NH₂;
Ac-[Ala⁷, Phe⁹]-IL-8-1(1-15)-
[linker]-IL-8-1(56-71)-NH₂
a320)

(SEQ ID NO:1653)

Ac-Ser-Ala-Lys-Glu-Leu-Arg-Ala-Gln-Phe-Ile-Lys-Thr-
Tyr-Ser-Lys-[11-aminoudecanoic acid]-Asn-Trp-Val-
Gln-Arg-Val-Val-Glu-Lys-Phe-Leu-Lys-Arg-Ala-Glu-
Asn-NH₂;
[Tyr⁷, Phe⁹]-IL-8-1(1-15)-
[linker]-IL-8-1(56-71)-NH₂
a321)

(SEQ ID NO:1654)

H-Ser-Ala-Lys-Glu-Leu-Arg-Ala-Gln-Phe-Ile-Lys-Thr-
Tyr-Ser-Lys-[11-aminoudecanoic acid]-Asn-Trp-Val-
Gln-Arg-Val-Val-Glu-Lys-Phe-Leu-Lys-Arg-Ala-Glu-
Asn-NH₂;
Ac-[Tyr⁷, Phe⁹]-IL-8-1(1-15)-
[linker]-IL-8-1(56-71)-NH-₂
a322)

(SEQ ID NO:1655)

H-Ser-Ala-Lys-Glu-Leu-Arg-Ala-Gln-Phe-Ile-Lys-Thr-
Tyr-Ser-Lys-[11-aminoudecanoic acid]-Asn-Trp-Val-
Gln-Arg-Val-Val-Glu-Lys-Phe-Leu-Lys-Arg-Ala-Glu-
Asn-NH₂;
[Tyr⁷, Phe⁹]-IL-8-1(1-15)-
[linker]-IL-8-1(56-71)-NH₂
a323)

(SEQ ID NO:1656)

H-Ser-Ala-Lys-Glu-Leu-Arg-Ala-Gln-Phe-Ile-Lys-Thr-
Tyr-Ser-Lys-[11-aminoudecanoic acid]-Asn-Trp-Val-
Gln-Arg-Val-Val-Glu-Lys-Phe-Leu-Lys-Arg-Ala-Glu-
Asn-NH₂;
Ac-[Tyr⁷, Phe⁹]-IL-8-1(1-15)-
[linker]-IL-8-1(56-71)-NH₂
a324)

(SEQ ID NO:1657)

H-Ser-Ala-Lys-Glu-Leu-Arg-Ala-Gln-Phe-Ile-Lys-Thr-
Tyr-Ser-Lys-[11-aminoudecanoic acid]-Asn-Trp-Val-
Gln-Arg-Val-Val-Glu-Lys-Phe-Leu-Lys-Arg-Ala-Glu-
Asn-NH₂;
[Tyr⁷, Phe⁹]-IL-8-1(1-15)-
[linker]-IL-8-1(56-71)-NH₂
a325)

(SEQ ID NO:1658)

H-Ser-Ala-Lys-Glu-Leu-Arg-Ala-Gln-Phe-Ile-Lys-Thr-
Tyr-Ser-Lys-[11-aminoudecanoic acid]-Asn-Trp-Val-
Gln-Arg-Val-Val-Glu-Lys-Phe-Leu-Lys-Arg-Ala-Glu-
Asn-NH₂;
Ac-[Tyr⁷, Phe⁹]-IL-8-1(1-15)-
[linker]-IL-8-1(56-71)-NH₂
a326)

(SEQ ID NO:1659)

Ac-Ser-Ala-Lys-Glu-Leu-Arg-Ala-Gln-Phe-Ile-Lys-
Thr-Tyr-Ser-Lys-[11-aminoudecanoic acid]-Asn-Trp-
Val-Gln-Arg-Val-Val-Glu-Lys-Phe-Leu-Lys-Arg-Ala-
Glu-Asn-NH₂;
Ac-[Ala⁷, Phe⁹, Arg¹¹]-IL-8-1(1-15)-
[linker]-IL-8-1(56-71)-NH-₂
a327)

(SEQ ID NO:1660)
Ac Ser-Ala-Lys-Glu-Leu-Arg-Ala-Gln-Phe-Ile-Arg-Thr-Tyr-Ser-Lys-
[11-aminoudecanoic acid]-Asn-Trp-Val-Gln-Arg-Val-Val-Glu-Lys-
Phe-Leu-Lys-Arg-Ala-Glu-Asn-NH-2;
Ac-[Tyr⁷, Phe⁹, Arg¹¹]-IL-8-1(1-15)-
[linker]-IL-8-1(56-71)-NH₂
a328)
(SEQ ID NO:1661)

Ac-Ser-Ala-Lys-Glu-Leu-Arg-Ala-Gln-Phe-Ile-Arg-
Thr-Tyr-Ser-Lys-[11-aminoudecanoic acid]-Asn-Trp-
Val-Gln-Arg-Val-Val-Glu-Lys-Phe-Leu-Lys-Arg-Ala-
Glu-Asn-NH_{2;}
Ac-[Tyr⁷, Phe⁹, Arg¹¹, Arg¹⁵]-
IL-8-1(1-15)-[linker]-IL-8-1(56-71)-NH₂
a329)

(SEQ ID NO:1662)

Ac-Ser-Ala-Lys-Glu-Leu-Arg-Ala-Gln-Phe-Ile-Arg-
Thr-Tyr-Ser-Lys-[11-aminoudecanoic acid]-Asn-Trp-
Val-Gln-Arg-Val-Val-Glu-Lys-Phe-Leu-Lys-Arg-Ala-
Glu-Asn-NH₂;
[Ala⁷, Phe⁹]-IL-8-1(1-15)-
[linker]-IL-8-1(56-71)-cyclo-(Glu⁶³-Lys⁶⁷)-NH₂
a330)

(SEQ ID NO:1663)

H-Ser-Ala-Lys-Glu-Leu-Arg-Ala-Gln-Phe-Ile-Arg-Thr-
Tyr-Ser-Lys-[11-aminoudecanoic acid]-Asn-Trp-Val-
Gln-Arg-Val-Val-Glu-Lys-Phe-Leu-Lys-Arg-Ala-Glu-
Asn-NH₂;
Ac-[Ala⁷, Phe⁹]-IL-8-1(1-15)-
[linker]-IL-8-1(56-71)-cyclo-(Glu⁶³-Lys⁶⁷)-NH₂
a331)

(SEQ ID NO:1664)

Ac-Ser-Ala-Lys-Glu-Leu-Arg-Ala-Gln-Phe-Ile-Arg-
Thr-Tyr-Ser-Lys-[11-aminoudecanoic acid]-Asn-Trp-
Val-Gln-Arg-Val-Val-Glu-Lys-Phe-Leu-Lys-Arg-Ala-
Glu-Asn-NH₂;
Ac-[Ala⁷, Phe⁹]-IL-8-1(1-15)-
[linker]-IL-8-1(56-71)-cyclo-(Glu⁶³-Lys⁶⁷)-NH₂
a332)

(SEQ ID NO:1665)

Ac-Ser-Ala-Lys-Glu-Leu-Arg-Ala-Gln-Phe-Ile-Arg-
Thr-Tyr-Ser-Lys-[11-aminoudecanoic acid]-Asn-Trp-
Val-Gln-Arg-Val-Val-Glu-Lys-Phe-Leu-Lys-Arg-Ala-
Glu-Asn-NH₂;
Ac-[Tyr⁷, Phe⁹]-IL-8-1(1-15)-[linker]-
IL-8-1(56-71)-cyclo-(Glu⁶³-Lys⁶⁷)-NH²
a333)

(SEQ ID NO:1666)

Ac-Ser-Ala-Lys-Glu-Leu-Arg-Ala-Gln-Phe-Ile-Arg-
Thr-Tyr-Ser-Lys-[11-aminoudecanoic acid]-Asn-Trp-
Val-Gln-Arg-Val-Val-Glu-Lys-Phe-Leu-Lys-Arg-Ala-
Glu-Asn-NH₂;
Ac-[Tyr⁷, Tyr⁹]-IL-8-1(1-15)-[linker]-
IL-8-1(56-71)-cyclo-(Glu⁶³-Lys⁶⁷)-NH²
a334)

(SEQ ID NO:1667)

Ac-Ser-Ala-Lys-Glu-Leu-Arg-Ala-Gln-Phe-Ile-Arg-
Thr-Tyr-Ser-Lys-[11-aminoudecanoic acid]-Asn-Trp-
Val-Gln-Arg-Val-Val-Glu-Lys-Phe-Leu-Lys-Arg-Ala-
Glu-Asn-NH₂;
Ac-[His⁷, Tyr⁹]-IL-8-1(1-15)-[linker]-
IL-8-1(56-71)-cyclo-(Glu⁶³-Lys⁶⁷)-NH²
a335)

(SEQ ID NO:1668)

Ac-Ser-Ala-Lys-Glu-Leu-Arg-Ala-Gln-Phe-Ile-Arg-
Thr-Tyr-Ser-Lys-[11-aminoudecanoic acid]-Asn-Trp-
Val-Gln-Arg-Val-Val-Glu-Lys-Phe-Leu-Lys-Arg-Ala-
Glu-Asn-NH₂;
Ac-[Tyr⁷, His⁹]-IL-8-1(1-15)-[linker]-
IL-8-1(56-71)-cyclo-(Glu⁶³-Lys⁶⁷)-NH²
a336)

(SEQ ID NO:1669)

Ac-Ser-Ala-Lys-Glu-Leu-Arg-Ala-Gln-Phe-Ile-Arg-
Thr-Tyr-Ser-Lys-[11-aminoudecanoic acid]-Asn-Trp-
Val-Gln-Arg-Val-Val-Glu-Lys-Phe-Leu-Lys-Arg-Ala-
Glu-Asn-NH₂;
Ac-[Tyr⁷, Trp⁹]-IL-8-1(1-15)-[linker]-
IL-8-1(56-71)-cyclo-(Glu⁶³-Lys⁶⁷)-NH²
a337)

(SEQ ID NO:1670)

Ac-Ser-Ala-Lys-Glu-Leu-Arg-Ala-Gln-Phe-Ile-Arg-
Thr-Tyr-Ser-Lys-[11-aminoudecanoic acid]-Asn-Trp-
Val-Gln-Arg-Val-Val-Glu-Lys-Phe-Leu-Lys-Arg-Ala-
Glu-Asn-NH₂;
Ac-[Ala⁷, Phe⁹, Arg¹¹]-IL-8-1(1-15)-
[linker]-IL-8-1(56-71)-cyclo-(Glu⁶³-Lys⁶⁷)-NH₂
a338)

(SEQ ID NO:1671)

Ac-Ser-Ala-Lys-Glu-Leu-Arg-Ala-Gln-Phe-Ile-Arg-
Thr-Tyr-Ser-Lys-[11-aminoudecanoic acid]-Asn-Trp-
Val-Gln-Arg-Val-Val-Glu-Lys-Phe-Leu-Lys-Arg-Ala-
Glu-Asn-NH₂;
Ac-[Tyr⁷, Trp⁹, Arg¹¹]-IL-8-1(1-15)-
[linker]-IL-8-1(56-71)-cyclo-(Glu⁶³-Lys⁶⁷)-NH₂
a339)

(SEQ ID NO:1672)

Ac-Ser-Ala-Lys-Glu-Leu-Arg-Ala-Gln-Phe-Ile-Arg-
Thr-Tyr-Ser-Lys-[11-aminoudecanoic acid]-Asn-Trp-
Val-Gln-Arg-Val-Val-Glu-Lys-Phe-Leu-Lys-Arg-Ala-
Glu-Asn-NH₂;
Ac-[Tyr⁷, Trp⁹, Arg¹¹, Arg¹⁵]-IL-8-1(1-15)-
[linker]-IL-8-1(56-71)-cyclo-(Glu⁶³-Lys⁶⁷)-NH₂
a340)

(SEQ ID NO:1673)

Ac-Ser-Ala-Lys-Glu-Leu-Arg-Ala-Gln-Phe-Ile-Arg-
Thr-Tyr-Ser-Lys-[11-aminoudecanoic acid]-Asn-Trp-
Val-Gln-Arg-Val-Val-Glu-Lys-Phe-Leu-Lys-Arg-Ala-
Glu-Asn-NH₂;
Ac-[Tyr⁷, Trp⁹, Arg¹¹, Arg¹⁵]-IL-8-1(1-15)-
[linker]-IL-8-1(56-71)-cyclo-(Glu⁶³-Lys⁶⁷)-NH₂
ac341)

(SEQ ID NO:1674)

Ac-Ser-Ala-Lys-Glu-Leu-Arg-Ala-Gln-Phe-Ile-Arg-
Thr-Tyr-Ser-Lys-[11-aminoudecanoic acid]-Asn-Trp-
Val-Gln-Arg-Val-Val-Glu-Lys-Phe-Leu-Lys-Arg-Ala-
Glu-Asn-NH₂;
Ac-[His⁷, Trp⁹, Arg¹¹, Arg¹⁵]-IL-8-
1(1-15)-[linker]-IL-8-1(56-71)-cyclo-(Glu⁶³-Lys⁶⁷)-NH₂
ac342)

(SEQ ID NO:1675)

Ac-Ser-Ala-Lys-Glu-Leu-Arg-Ala-Gln-Phe-Ile-Arg-
Thr-Tyr-Ser-Lys-[11-aminoudecanoic acid]-Asn-Trp-
Val-Gln-Arg-Val-Val-Glu-Lys-Phe-Leu-Lys-Arg-Ala-
Glu-Asn-NH₂.

[0114] wherein,
[0115] R_{N} can be independently selected from substituted, unsubstituted, hetero-, straight-chained, branched, cyclic, saturated or unsaturated aliphatic radicals; or a substituted, unsubstituted, or hetero-aromatic radicals; PEG and derivatives thereof; and any other modifying group;
[0116] R_{C} can be independently selected from substituted, unsubstituted, hetero-, straight-chained, branched, cyclic, saturated or unsaturated aliphatic radical; or a substituted, unsubstituted, or hetero-aromatic radicals, PEG and derivatives thereof; and any other modifying group;
[0117] Xaa₁ can be any L- or D-natural amino acid and any non-natural amino acid;
[0118] Xaa₂ can be any L- or D-natural amino acid and any non-natural amino acid;
[0119] Xaa₃ can be L-Pro, D-Pro, P*, Btd and any L- or D-natural and non-natural amino acid;
[0120] Xaa₄ can be P*, Btd and any L- or D-natural amino acid and any non-natural amino acid, wherein
   [0121] P* can be represented by a formula [chemical structure]
   [0122] Btd can be represented by formula [chemical structure]
[0123] wherein, z can be a hydrogen, can be independently selected from substituted, unsubstituted, hetero-, straight-chained, branched, cyclic, saturated or unsaturated aliphatic radical; or a substituted, unsubstituted, or hetero-aromatic radicals; PEG and derivatives thereof, any other functional group.

[0124] In some embodiments, z can be any functional group taught herein. In other embodiments, z can be hydrogen; hydroxyl, amino, sulfhydryl; aminoalkyl, alkylcarbonyl, arylcarbonyl, aryl; polyethylene glycol, heparin, hirudin, hyaluronic acid; and, any derivative, analog, homolog or combination thereof. In other embodiments, z can be any agent taught herein.
[0125] Xaa₅ can be any L- or D-natural amino acid and any non-natural amino acid with functional side chain to allow cyclization with Xaa₆.
[0126] Xaa₆ can be any L- or D-natural amino acid and any non-natural amino acid with functional side chain to allow cyclization with Xaa₅;
[0127] the linker can be optional and can comprise, for example, any natural or non-natural amino acid; and,
[0128] any additional amino acids identified in square brackets in a header indicates that the peptide described by the header is at least an analog of a native fragment, and the position of the amino acid substitutions are noted by the standard abbreviation for the amino acid substituent with a superscript number indicating the residue positions at which the modification has occurred.
[0129] the underlining indicates that the underlined residues are cyclized, and the cyclization can include formation of a disulphide bond, an alkenyl bond, an ether bond, or a lactam.

[0130] The amino acids used in the present invention may be organic compounds comprising an amino group and a carboxyl group, and the amino group may be primary or secondary. Examples of amino acids include, but are not limited to, glycine, alanine, valine, leucine, isoleucine, methionine, phenylalanine, tyrosine, aspartic acid, glutamic acid, lysine, arginine, serine, threonine, cysteine, asparagine, proline, tryptophan, histidine and combinations thereof. In some embodiments, the amino acids are represented by a formula:

[chemical structure]

[0131] wherein R_{L} may be a substituted, unsubstituted, hetero-, straight-chained, branched, cyclic, saturated or unsaturated aliphatic radical; or a substituted, unsubstituted, or hetero-aromatic radical. In some embodiments, R_{L} can be substituted, unsubstituted, or hetero-forms of methyl, iso-propyl, sec-butyl, iso-butyl, benzyl, or a combination thereof.

[0132] In embodiments where R_{L} is substituted, examples of substitutents include, but are not limited to, hydroxyl, carboxyl, amino, imino groups and combinations thereof. In embodiments where R_{L} is heteroaliphatic, examples of heteroatoms include, but are not limited to, sulfur, phosphorous, oxygen, nitrogen and combinations thereof. In other embodiments, R_{L} can comprise substituted or unsubstituted poly(alkylene glycols), which include, but are not limited to, PEG, PEG derivatives such as mPEG, poly(ethylene oxide), PPG, poly(tetramethylene glycol), poly(ethylene oxide-co-propylene oxide), or copolymers and combinations thereof.

[0133] In some embodiments, the amino acids may be limited to bifunctional amino acids. In some embodiments, the amino acids may be limited to trifunctional amino acids. In some embodiments, the amino acids may be limited to diamines. In some embodiments, the amino acids may be limited to triamines. In some embodiments, the amino acids may be limited to monocarboxylics. In some embodiments, the amino acids may be limited to dicarboxylics. In some embodiments, the amino acids may be limited to aliphatics. In some embodiments, the amino acids may be limited to aromatics. In some embodiments, the amino acids may be limited to amides. In some embodiments, the amino acids may not include lysine. It is to be appreciated that one skilled in the art should recognize that some of the groups, subgroups, and individual amino acids may not be used in some embodiments of the present invention.

[0134] In some embodiments, R_{L} can be a substituted or unsubstituted alkylene comprising Cₙ carbons in the alkylene backbone, wherein n is an integer ranging from 1 to about 20; from about 2 to about 16; from about 3 to about 12; from about 4 to about 10; from about 3 to about 8, and any range therein. In these embodiments, R_{L} can be, for example, 11-amino-undecanoic acid.

[0135] In other embodiments, the linker comprises any combination of natural or non-natural amino acids, (Xaa), wherein the number of amino acids ranges from 1 to about 50; from about 2 to about 40; from about 3 to about 30, or any range therein. In other embodiments, R_{L} comprises any combination of four natural or non-natural amino acids such as, for example, -(Gly)₄-, otherwise referred to as SEQ ID NO:1640 in the present application.

[0136] In some embodiments, there is no linker. In other embodiments, the mimetics are comprised of portions of the human CXC chemokine IL-8 that are connected directly to each other through amide bonds. In other embodiments, the mimetics are comprised of the human CXC chemokine IL-8 that are connected by disulfide bonds such as, the disulfide bonds that can form between Cys residues. In other embodiments, R_{N} can comprise the peptide sequence Glu-Leu-Arg and a linker. In other embodiments, R_{N} can comprise the peptide sequence Glu-Leu-Arg and a linker, wherein the Glu-Leu-Arg are the last three residues in R_{N} and the linker attaches R_{N} to a C-terminal region containing at least SEQ ID NO:26.

[0137] It is to be appreciated that a wide variety of amino acid substitutions may also be made in the polypeptide sequences. Examples of such substitutions include, but are not limited to, substituting lysine for glutamic acid, lysine for aspartic acid, ornithine for glutamic acid, and ornithine for aspartic acid.

[0138] The IL-8 mimetics may be prepared, analyzed and modified using techniques known to those skilled in the art. In some embodiments, a peptide or polypeptide component of a CXCR1 or CXCR2 agonist may be comprised of a peptide synthesized using standard techniques such as, for example, a commercially available automated peptide synthesizer. In other embodiments, the peptides and polypeptides may be purified by HPLC and analyzed by mass spectrometry. In other embodiments, the peptides and polypeptides may be assayed for CXCR1 or CXCR2 agonist activity in accordance with standard methods. In other embodiments, the peptides and polypeptides may be dimerized through a disulfide bridge formed by gentle oxidation of cysteines with 10% dimethyl sulfoxide (DMSO) in water, and the dimer formation may be verified using mass spectrometry after HPLC purification.

[0139] In some embodiments, one or more modifying groups may be attached to the IL-8 mimetics at any suitable reactive group on the IL-8 mimetic such as, for example, an amino group, a carboxyl group, or a hydroxyl group using methods known to those skilled in the art. As described above, examples of chemical connections used to attach the modifying groups include, but are not limited to, ethers, amides, esters, anhydride, orthoester, alkylamine, sulphide, disulphide, carbamate, all-aromatic carbonate, urea bonds, and the like.

[0140] Pharmaceutical Compositions

[0141] The invention further provides pharmaceutical compositions containing the IL-8 mimetics. The pharmaceutical compositions include an IL-8 mimetic in an amount that is diagnostic, therapeutic and/or prophylactic in the diagnosis, prevention, treatment and amelioration of symptoms of disease.

[0142] The amount of an IL-8 mimetic used in the compositions can vary according to factors such as type of disease, age, sex, and weight of the subject. Dosage regimens may be adjusted to optimize a therapeutic response. In some embodiments, a single bolus may be administered; several divided doses may be administered over time; the dose may be proportionally reduced or increased; or any combination thereof, as indicated by the exigencies of the therapeutic situation and factors known one of skill in the art. It is to be noted that dosage values may vary with the severity of the condition to be alleviated. Dosage regimens may be adjusted over time according to the individual need and the professional judgment of the person administering or supervising the administration of the compositions, and the dosage ranges set forth herein are exemplary only and do not limit the dosage ranges that may be selected by medical practitioners.

[0143] The terms “administration” or “administering” refer to a method of incorporating a compound into the cells or tissues of a subject, either in vivo or ex vivo to diagnose, prevent, treat, or ameliorate a symptom of a disease. In one example, a compound can be administered to a subject in vivo parenterally. In another example, a compound can be administered to a subject by combining the compound with cell tissue from the subject ex vivo for purposes that include, but are not limited to, cell expansion and mobilization assays. When the compound is incorporated in the subject in combination with one or active agents, the terms “administration” or “administering” can include sequential or concurrent incorporation of the compound with the other agents such as, for example, any agent described above. A pharmaceutical composition of the invention is formulated to be compatible with its intended route of administration. Examples of routes of administration include, but are not limited to, parenteral such as, for example, intravenous, intradermal, intramuscular, and subcutaneous injection; oral; inhalation; intranasal; transdermal; transmucosal; and rectal administration.

[0144] An “effective amount” of a compound of the invention can be used to describe a therapeutically effective amount or a prophylactically effective amount. A “therapeutically effective amount” refers to an amount that is effective at the dosages and periods of time necessary to achieve a desired therapeutic result and may also refer to an amount of active compound, prodrug or pharmaceutical agent that elicits any biological or medicinal response in a tissue, system, or subject that is sought by a researcher, veterinarian, medical doctor or other clinician that may be part of a treatment plan leading to a desired effect. In some embodiments, the therapeutically effective amount may need to be administered in an amount sufficient to result in amelioration of one or more symptoms of a disorder, prevention of the advancement of a disorder, or regression of a disorder. In one example, treatment of an inflammatory disorder or an autoimmune disorder characterized by inflammation, a therapeutically effective amount preferably refers to the amount of a therapeutic agent that reduces the inflammation of a joint, organ or tissue by at least 5%, at least 10%, at least 15%, at least 20%, at least 25%, at least 30%, at least 35%, at least 40%, at least 45%, at least 50%, at least 55%, at least 60%, at least 65%, at least 70%, at least 75%, at least 80%, at least 85%, at least 90%, at least 95%, or at least 100%. The term “treating” refers to the administering one or more diagnostic, therapeutic or prophylactic agents including, but not limited to IL-8 mimetics.

[0145] A “prophylactically effective amount” refers to an amount that is effective at the dosages and periods of time necessary to achieve a desired prophylactic result such as, for example, preventing or inhibiting a cytotoxic effect of a cytotoxic agent. Typically, a prophylactic dose is used in a subject prior to the onset of a disease, or at an early stage of the onset of a disease, to prevent or inhibit onset of the disease or symptoms of the disease. A prophylactically effective amount may be less than, greater than, or equal to a therapeutically effective amount.

[0146] In some embodiments, the administration can be oral. In other embodiments, the administration can be subcutaneous injection. In other embodiments, the administration can be intravenous injection using a sterile isotonic aqueous buffer. In another embodiment, the administration can include a solubilizing agent and a local anesthetic such as lignocaine to ease discomfort at the site of injection. In other embodiments, the administrations may be parenteral to obtain, for example, ease and uniformity of administration.

[0147] The compounds can be administered in dosage units. The term “dosage unit” refers to discrete, predetermined quantities of a compound that can be administered as unitary dosages to a subject. A predetermined quantity of active compound can be selected to produce a desired therapeutic effect and can be administered with a pharmaceutically acceptable carrier. The predetermined quantity in each unit dosage can depend on factors that include, but are not limited to, (a) the unique characteristics of the active compound and the particular therapeutic effect to be achieved, and (b) the limitations inherent in the art of creating and administering such dosage units.

[0148] A “pharmaceutically acceptable carrier” is a diluent, adjuvant, excipient, or vehicle with which the IL-8 mimetic is administered. A carrier is pharmaceutically acceptable after approval by a state or federal regulatory agency or listing in the U.S. Pharmacopeial Convention or other generally recognized sources for use in subjects.

[0149] The pharmaceutical carriers include any and all physiologically compatible solvents, dispersion media, coatings, antibacterial and antifungal agents, isotonic and absorption delaying agents, and the like. Examples of pharmaceutical carriers include, but are not limited to, sterile liquids, such as water, oils and lipids such as, for example, phospholipids and glycolipids. These sterile liquids include, but are not limited to, those derived from petroleum, animal, vegetable or synthetic origin such as, for example, peanut oil, soybean oil, mineral oil, sesame oil, and the like. Water can be a preferred carrier for intravenous administration. Saline solutions, aqueous dextrose and glycerol solutions can also be liquid carriers, particularly for injectable solutions.

[0150] Suitable pharmaceutical excipients include, but are not limited to, starch, sugars, inert polymers, glucose, lactose, sucrose, gelatin, malt, rice, flour, chalk, silica gel, sodium stearate, glycerol monostearate, talc, sodium chloride, dried skim milk, glycerol, propylene, glycol, water, ethanol, and the like. The composition can also contain minor amounts of wetting agents, emulsifying agents, pH buffering agents, or a combination thereof. The compositions can take the form of solutions, suspensions, emulsion, tablets, pills, capsules, powders, sustained-release formulations and the like. Oral formulations can include standard carriers such as, for example, pharmaceutical grades mannitol, lactose, starch, magnesium stearate, sodium saccharine, cellulose, magnesium carbonate, and the like. See Martin, E. W. Remington's Pharmaceutical Sciences. Supplementary active compounds can also be incorporated into the compositions.

[0151] In some embodiments, the carrier is suitable for parenteral administration. In other embodiments, the carrier can be suitable for intravenous, intraperitoneal, intramuscular, sublingual or oral administration. In other embodiments, the pharmaceutically acceptable carrier may comprise pharmaceutically acceptable salts.

[0152] Pharmaceutical formulations for parenteral administration may include liposomes. Liposomes and emulsions are delivery vehicles or carriers that are especially useful for hydrophobic drugs. Depending on biological stability of the therapeutic reagent, additional strategies for protein stabilization may be employed. Furthermore, one may administer the drug in a targeted drug delivery system such as, for example, in a liposome coated with target-specific antibody. The liposomes will bind to the target protein and be taken up selectively by the cell expressing the target protein.

[0153] Therapeutic compositions typically must be sterile and stable under the conditions of manufacture and storage. The composition can be formulated as a solution, microemulsion, liposome, or other ordered structure suitable for a high drug concentration. In some embodiments, the carrier can be a solvent or dispersion medium including, but not limited to, water; ethanol; a polyol such as for example, glycerol, propylene glycol, liquid polyethylene glycol, and the like; and, combinations thereof. The proper fluidity can be maintained in a variety of ways such as, for example, using a coating such as lecithin, maintaining a required particle size in dispersions, and using surfactants.

[0154] In some embodiments, isotonic agents can be used such as, for example, sugars; polyalcohols that include, but are not limited to, mannitol, sorbitol, glycerol, and combinations thereof; and sodium chloride. Sustained absorption characteristics can be introduced into the compositions by including agents that delay absorption such as, for example, monostearate salts, gelatin, and slow release polymers. Carriers can be used to protect active compounds against rapid release, and such carriers include, but are not limited to, controlled release formulations in implants and microencapsulated delivery systems. Biodegradable and biocompatible polymers can be used such as, for example, ethylene vinyl acetate, polyanhydrides, polyglycolic acid, collagen, polyorthoesters, polylactic acid, polycaprolactone, polyglycolic copolymer (PLG), and the like. Such formulations can generally be prepared using methods known to one of skill in the art.

[0155] The compounds may be administered as suspensions such as, for example, oily suspensions for injection. Lipophilic solvents or vehicles include, but are not limited to, fatty oils such as, for example, sesame oil; synthetic fatty acid esters, such as ethyl oleate or triglycerides; and liposomes. Suspensions that can be used for injection may also contain substances that increase the viscosity of the suspension such as, for example, sodium carboxymethyl cellulose, sorbitol, or dextran. Optionally, a suspension may contain stabilizers or agents that increase the solubility of the compounds and allow for preparation of highly concentrated solutions.

[0156] In one embodiment, a sterile and injectable solution can be prepared by incorporating an effective amount of an active compound in a solvent with any one or any combination of desired additional ingredients described above, filtering, and then sterilizing the solution. In another embodiment, dispersions can be prepared by incorporating an active compound into a sterile vehicle containing a dispersion medium and any one or any combination of desired additional ingredients described above. Sterile powders can be prepared for use in sterile and injectable solutions by vacuum drying, freeze-drying, or a combination thereof, to yield a powder that can be comprised of the active ingredient and any desired additional ingredients. Moreover, the additional ingredients can be from a separately prepared sterile and filtered solution. In another embodiment, an IL-8 mimetic may be prepared in combination with one or more additional compounds that enhance the solubility of the IL-8 mimetic.

[0157] In some embodiments, the compounds can be administered by inhalation through an aerosol spray or a nebulizer that may include a suitable propellant such as, for example, dichlorodifluoromethane, trichlorofluoromethane, dichlorotetrafluoroethane, carbon dioxide, or a combination thereof. In one example, a dosage unit for a pressurized aerosol may be delivered through a metering valve. In another embodiment, capsules and cartridges of gelatin, for example, may be used in an inhaler and can be formulated to contain a powderized mix of the compound with a suitable powder base such as, for example, starch or lactose.

[0158] In some embodiments, a therapeutically or prophylactically effective amount of an IL-8 mimetic may range in concentration from about 0.001 nM to about 0.1 M; from about 0.001 nM to about 0.05 M; from about 0.01 nM to about 15 μM; from about 0.01 nM to about 10 μM, or any range therein. In some embodiments, the IL-8 mimetics may be administered in an amount ranging from about 0.001 mg/kg to about 50 mg/kg; from about 0.005 mg/kg to about 40 mg/kg; from about 0.01 mg/kg to about 30 mg/kg; from about 0.01 mg/kg to about 25 mg/kg; from about 0.1 mg/kg to about 20 mg/kg; from about 0.2 mg/kg to about 15 mg/kg; from about 0.4 mg/kg to about 12 mg/kg; from about 0.15 mg/kg to about 10 mg/kg, or any range therein, wherein a human subject is assumed to average about 70 kg.

[0159] The IL-8 mimetics of the present invention can be administered as a diagnostic, therapeutic or prophylactic agent in a combination therapy with the administering of one or more other agents. The agents of the present invention can be administered concomitantly, sequentially, or cyclically to a subject. Cycling therapy involves the administering a first agent for a predetermined period of time, administering a second agent for a second predetermined period of time, and repeating this cycling for any desired purpose such as, for example, to enhance the efficacy of the treatment. The agents of the present invention can also be administered concurrently. The term “concurrently” is not limited to the administration of agents at exactly the same time, but rather means that the agents can be administered in a sequence and time interval such that the agents can work together to provide additional benefit. Each agent can be administered separately or together in any appropriate form using any appropriate means of administering the agent or agents.

[0160] Each of the agents described herein can be administered to a subject in combination therapy. In some embodiments, the agents can be administered at points in time that vary by about 15 minutes, 30 minutes, 1 hour, 2 hours, 4 hours, 8 hours, 12 hours, 18 hours, 24 hours, 48 hours or 1 week in time. In some embodiments, at least one of the agents is an immunomodulatory agent. In other embodiments, the agents can include antiproliferatives, antineoplastics, antimitotics, anti-inflammatories, antiplatelets, anticoagulants, antifibrins, antithrombins, antibiotics, antiallergics, antioxidants, and any prodrugs, codrugs, metabolites, analogs, homologues, congeners, derivatives, salts and combinations thereof.

[0161] The present invention encompasses sustained release formulations for the administration of one or more agents. In some embodiments, the sustained release formulations can reduce the dosage and/or frequency of the administrations of such agents to a subject.

[0162] Articles of Manufacture

[0163] The present invention provides for articles of manufacture that encompass finished, packaged and labelled pharmaceutical products. The articles of manufacture include the appropriate unit dosage form in an appropriate vessel or container such as, for example, a glass vial or other container that is hermetically sealed. In the case of dosage forms suitable for parenteral administration, the active ingredient, e.g. one or more agents including an IL-8 mimetic, is sterile and suitable for administration as a particulate-free solution. In other words, the invention encompasses both parenteral solutions and lyophilized powders, each being sterile, and the latter being suitable for reconstitution prior to injection. Alternatively, the unit dosage form may be a solid suitable for oral, transdermal, topical or mucosal delivery.

[0164] In some embodiments, the unit dosage form is suitable for intravenous, intramuscular, topical or subcutaneous delivery. Thus, the invention encompasses solutions, which are preferably sterile and suitable for each route of delivery. The concentration of agents and amounts delivered are included as described herein.

[0165] As with any pharmaceutical product, the packaging material and container are designed to protect the stability of the product during storage and shipment. In addition, the articles of manufacture can include instructions for use or other information material that can advise the user such as, for example, a physician, technician or patient, regarding how to properly administer the composition as a diagnostic, prophylactic, therapeutic, or ameliorative treatment of the disease of concern. In some embodiments, instructions can indicate or suggest a dosing regimen that includes, but is not limited to, actual doses and monitoring procedures.

[0166] In other embodiments, the instructions can include informational material indicating that the administering of the compositions can result in adverse reactions including but not limited to allergic reactions such as, for example, anaphylaxis. The informational material can indicate that allergic reactions may exhibit only as mild pruritic rashes or may be severe and include erythroderma, vasculitis, anaphylaxis, Steven-Johnson syndrome, and the like. The informational material should indicate that anaphylaxis can be fatal and may occur when any foreign protein is introduced into the body. The informational material should indicate that these allergic reactions can manifest themselves as urticaria or a rash and develop into lethal systemic reactions and can occur soon after exposure such as, for example, within 10 minutes. The informational material can further indicate that an allergic reaction may cause a subject to experience paresthesia, hypotension, laryngeal edema, mental status changes, facial or pharyngeal angioedema, airway obstruction, bronchospasm, urticaria and pruritus, serum sickness, arthritis, allergic nephritis, glomerulonephritis, temporal arthritis, eosinophilia, or a combination thereof.

[0167] In some embodiments, the articles of manufacture can comprise one or more packaging materials such as, for example, a box, bottle, tube, vial, container, sprayer, insufflator, intravenous (I.V.) bag, envelope, and the like; and at least one unit dosage form of an agent comprising an IL-8 mimetic within the packaging material. In other embodiments, the articles of manufacture may also include instructions for using the composition as a diagnostic, prophylactic, therapeutic, or ameliorative treatment for the disease of concern.

[0168] In other embodiments, the articles of manufacture can comprise one or more packaging materials such as, for example, a box, bottle, tube, vial, container, sprayer, insufflator, intravenous (I.V.) bag, envelope, and the like; and a first composition comprising at least one unit dosage form of an agent comprising an IL-8 mimetic within the packaging material, along with a second composition comprising a second agent such as, for example, a glycosaminoglycan, phospholipid, poly(alkylene glycol), any other bioactive agent taught herein, or any prodrugs, codrugs, metabolites, analogs, homologues, congeners, derivatives, salts and combinations thereof. In other embodiments, the articles of manufacture may also include instructions for using the composition as a diagnostic, prophylactic, therapeutic, or ameliorative treatment for the disease of concern, which may include, for example, autoimmune disorders, inflammatory disorders, organ transplant rejections, disorders associated with the treatment of cancer, cardiovascular disorders, hematological disorders, neurological disorders, and infectious disorders.

### EXAMPLES

[0169] The following examples are presented to illustrate embodiments of the present invention and are not intended to limit the scope of the invention in any way:

### Example 1

[0170] Peptides of the invention may be synthesized chemically from the C-terminus to the N-terminus (“reverse sequence”) using the Fmoc/tBu strategy on a continous flow peptide synthesizer. The following procedure is used, for example, to couple residues 56-71 of the native IL-8 sequence:

[0171] Reagents and Procedures

[0172] Main Solvent: a grade certified, ACS spectroanalyzed, N,N-dimethylformamide (DMF) (Fisher, D131-4).

[0173] Deblocking Agent: 20% piperidine (Aldrich, 10,409-4) in DMF containing 0.5% (v/v) triton X100 (Sigma, T-9284).

[0174] Activating Agents: 2-(H-benzotriazol-lyl)-1,1,3,3-tetramethyluronium tetrafluoroborate (TBTU) (Quantum Richelieu, R0139); hydroxybenzotriazole (HOBt) (Quantum Richelieu, R0166-100), each at a concentration of 0.52 M in DMF; and 4-methylmorpholine (NMM) (Aldrich, M5 655-7) at a concentration of 0.9 M in DMF. In the case of amino acids sensitive to racemization such as, for example, cysteine, a 2,4,6-collidine (Aldrich, 14,238-7) is used at a concentration of 0.78 M in a 1/1 (v/v) mixture of DMF/dichloromethane (DCM).

[0175] Support Resin: TentaGel R RAM (90 μm) beads are used with a 9-fluorenylmethoxycarbonyl (Fmoc) Rink-type linker (Peptides Int'l, RTS-9995-PI) in a column. The synthesis begins using 0.5 g of the resin with a degree of substitution of 0.21 mmol/g for 0.21 (0.5) or 0.101 mmol of peptide.

[0176] An Fmoc-L-amino derivative is prepared with protected side-chains. The side-chains are protected using t-butoxycarbonyl (Boc), t-butyl (tBu), and triphenylmethyl (Trt) groups in a 4 fold excess (Peptides Int'l; Bachem; Novabiochem; Chem-Impex, Inc). The Glu⁶³ and Lys⁶⁷ residues are Allyl-protected (Millipore/Perseptive Biosys.).

[0177] Initial Amino Loading and Peptide Synthesis Procedure

[0178] The synthesis starts from the C-terminus, and the first amino acid attached to the resin in the synthesis is Asn⁷¹. The remaining residues are double coupled automatically at ambient temperature using a 4-fold excess of the residues and the coupling reagents, TBTU and HOBt in DMF, for each coupling. Double coupling is used to ensure a high yield of coupling and can be a second coupling step that follows single coupling.

[0179] The synthesis is interrupted after the first Val residue in the reverse sequence, Val⁶², for lactamization of residues Glu⁶³ and Lys⁶⁷ away from the column. The peptide bound to the support is cyclized by first removing the lateral allyl groups from Glu²⁴ and Lys²⁸ as described below. The peptide synthesis was then resumed.

[0180] Removal of the Allyl Groups

[0181] The support-bound peptide is removed from the column and a 3-fold solution (347 mg) of tetrakis(triphenylphosphine)palladium(0) (Pd(PPh₃)₄) (Sigma-Aldrich, 21, 666-6) and 0.1 mmol of the peptide attached to the resin is dissolved in 5% acetic acid. The peptide is activated using 2.5% NMM in CHCl₃ at a concentration of 0.14 M under an argon purge. The solution is added to the support-bound peptide in a reaction vial containing a small magnetic bar for gentle stirring. The mixture is flushed with argon, sealed and stirred at room temperature for 6 hours. The support-bound peptide is transferred to a filter funnel and subject to a series of washes: (i) the first wash is with a 30 ml of a 0.5% (w/w) solution of sodium diethyldithiocarbonate in DMF; (ii) the second wash is with DCM alone; (iii) the third wash is with a 1/1 (v/v) mixture of DCM/DMF; and (iv) the fourth wash is with DMF alone. A positive Kaiser test indicated the deprotection of the amino side chained of the Lys⁶⁷.

[0182] Lactam Formation:

[0183] Activating Agent: 7-azabenztriazol-1-yloxytris(pyrrolindino)phosphonium-hexafluorophosphate (PyAOP) (PerSeptive Biosys. GmbH, GEN076531) is used at a concentration that is 1.4-fold over the 0.105 mmol peptide sample size (e.g., 0.105 mmol×1.4 fold×521.7 MW=76.6 mg PyAOP); and NMM is used at a concentration that is 1.5-fold over the PyAOP (e.g., 0.105 mmol×1.4 fold×1.5 fold=0.23 mmol NMM).

[0184] The lactamization is a cyclization reaction that is carried out with the support-bound peptide in an amino acid vial at room temperature overnight (e.g., ˜16 hours) with gentle agitation. The support-bound peptide is poured back into the column, washed with DMF, and then allowed to continue through completion of the cyclization process, wherein a cyclic amide bridge is thereby introduced into the peptide. A negative Kaiser test is used to indicate the completion of the cyclization process.

[0185] Removal of the Final Product from the Support

[0186] The support-bound peptide is removed from the synthesizer, placed in a medium filter funnel, washed with DCM to replace the non-volatile DMF, and thoroughly dried under high vacuum for at least two hours, or preferably, overnight.

[0187] Cleavage Mixture (reagent K): 100 ml of a trifluoroacetic acid (TFA)/Phenol/Water/Thio-Anisol/EDT (82/5/5/5/2.5)(v/v) mixture is prepared. The support-bound peptide (0.5 g) is poured into 7.5 ml of reagent K with gentle agitation on a rocker, allowed to react for 4 hours at room temperature, filtered, and washed with neat TFA. The 7.5 ml of reagent K contains the following:

| | |
|---|---|
| TFA | 6.15 ml (Halocarbon) |
| Phenol | 0.375 ml (Aldrich) |
| Water | 0.375 ml (MillQ) |
| Thio-Anisol | 0.375 ml (Aldrich) |
| EDT | 0.187 ml (Aldrich) |
| Total | 7.5 ml |

[0188] Precipitation of the Peptide

[0189] The cleaved (free) peptide solution is filtered through a filter funnel into a 50 ml round bottom flask. The support is rinsed twice with 4 ml TFA to release the free peptide. The solution of TFA and peptide is concentrated on a rotavap and added drop wise into cold diethyl ether previously treated with activated neutral aluminum oxide to make it free of peroxide. An excess of ether is used at approximately 10-fold the weight of the support. The support beads from which the peptide was cleaved was stored until the yield was determined and the peptide was characterized. The precipitate is collected at room temperature in a screw-capped 50 ml polypropylene vial after centrifugation for 4 minutes at 2000 rpm in a bench-top centrifuge. The pellets of free peptide were washed 3× with cold ether, centrifuged and dried under a flow of argon. The precipitate was dissolved in 20% acetonitrile with 0.1% TFA and lyophilized.

[0190] Crude Product Characterization

[0191] The product is purified and characterized using an analytical HPLC procedure. A Vydac 218TP54 column (C18 reversed-phase, 4.6 mm×150 mm inner column dimensions, and 5 μm particle size). A multisolvent mobile phase is used, and the eluants are a 0.1% TFA/H₂O (solvent A) and a 0.1% TFA/acetonitrile (solvent B).

[0192] Elution Conditions: A multisolvent delivery system is used and combines solvent A and solvent B to alter the polarity of the mobile phase during elution. The mobile phase is delivered at a flow rate of 1.0 ml/min and at a concentration of 20-50% B for 40 minutes; at a concentration of 60-90% B for 5 minutes; at a concentration of 90-20% B for 5 minutes; and at a concentration of 20% B for 10 minutes. The detector is set at 214 nm to read 0.5 absorbance units over a full scale.

[0193] Sample Preparation:

[0194] An aliquot of the product is weighed and dissolved in a mixture of 20% acetonitrile/0.1% TFA (v/v) at a concentration of 2 mg/ml. The solution is microfuged and 20 μl is injected into the HPLC column. Samples corresponding to the main and major peaks are collected, SpeedVac dried, and characterized by molecular weights using mass spectroscopy.

### Example 2

[0195] A competitive-dose-response binding assay was used to compare the ability of the native IL-8 to bind to the CXCR1/CXCR2 receptors with the ability of IL-8 agonists to bind to the CXCR1/CXCR2 receptors. An ¹²⁵I radiolabeled derivative of native IL-8 (“¹²⁵I-IL-8”) was used to measure the binding activity of native IL-8. The competitive dose response is shown in FIG. 1.

[0196] FIG. 1 shows the CXCR2 receptor binding of the IL-8 mimetics as competing ligands. Differentiated HL-60 cells were assessed for ¹²⁵I-IL-8 binding following 2 hours of incubation with IL-8 or its agonist, and ¹²⁵I-IL-8. The ¹²⁵I-IL-8 was added at a concentration of 2 nM in the presence of native IL-8 and the IL-8 mimetics at their respective concentrations as shown. The results are expressed as percentages of the maximal specific binding that was determined without competing ligand and are representative of one independent experiment.

[0197] The procedure used HL-60 cells (American Type Culture Collection) that were grown in an RPMI culture medium containing phenol red, 10% fetal bovine serum, and antibiotics consisting of 100 U/ml penicillin G sodium and 100 μg/ml streptomycin sulfate. The cells were added at a density ranging from about 2×10⁵ to about 8×10⁵ cells/ml. The cells were then induced to differentiate and express CXCR2 by treating the cells for 3-7 days with 1.25% DMSO. Millipore MultiScreen plates and a Durapore® membrane (Millipore Corp.) were used for high throughput binding assays.

[0198] The binding buffer used for the assay consisted of 0.5% (w/v) bovine serum albumin (BSA) (e.g., 0.5 g BSA/100 ml buffer), 50 mM 4-(2-hydroxyethyl)-1-piperazineethanesulfonic acid (HEPES), 150 mM NaCl, 5 mM MgCl₂, 1 mM CaCl₂ and 0.02% sodium azide. The HL-60 cells were harvested, washed with plain RPMI, and resuspended in binding buffer at density of about 5×10⁶ cells/ml. The cells were preincubated with the IL-8 mimetics for 30 minutes. The binding buffer, the ¹²⁵I-IL-8, and the cells incubating with native IL-8 or IL-8 mimetic were then added to wells used to hold the cells in the assay. The cells were then incubated in the wells for another 2 hours with shaking. The IL-8 mimetics were used in concentrations indicated in FIG. 1 with a competitive dose of 2 nM of radiolabeled ¹²⁵I-IL-8.

[0199] After three washes with cold phosphate buffered saline (PBS), plates were dried and radioactivity counted using a CliniGamma gamma counter (LKB Wallac). Controls include (i) wells with only binding buffer and radiolabeled IL-8 chemokine for background, and (ii) wells with binding buffer, an unlabelled native IL-8 chemokine standard, radiolabeled chemokine and cells for standardization. A dose response curve is developed using a range of native IL-8 concentrations, and a concentration of 0 μg/ml is included.

[0200] Each data point is expressed as a percentage of the maximal specific binding that was determined using the radiolabeled native IL-8 without the competing IL-8 mimetics (“IL-8 agonist”) and represents measurements obtained from two or three wells in a representative experiment. A concentration-dependent inhibition of ¹²⁵I-IL-8 binding is shown in FIG. 1 and summarized in Table 1 and indicates the affinity of native IL-8 and IL-8 mimetics for the receptor.

TABLE 1

| SEQ ID NO: | IC₅₀ (μg/ml) | ¹²⁵I-IL-8 bound at maximal inhibition (%) |
|---|---|---|
| (Native IL-8) | 2.8 | 2.2 |
| 1646 | 47.5 | 2.9 |
| 1673 | 50.0 | 30.4 |
| 1664 | 56.7 | 7.0 |
| 1670 | 56.7 | 19.3 |
| 1674 | 60.0 | 34.5 |
| 1665 | 61.7 | 7.9 |
| 1667 | 61.7 | 15.8 |
| 1666 | 63.3 | 15.4 |
| 1671 | 65.0 | 16.6 |
| 1663 | 66.7 | 3.3 |
| 1672 | 70.0 | 22.2 |
| 1675 | 70.0 | 18.0 |
| 1654 | 78.3 | 8.9 |
| 1668 | 78.8 | 14.2 |
| 1661 | 91.7 | 13.1 |
| 1655 | 93.3 | 12.5 |
| 1642 | 105.0 | 51.5 |
| 1647 | 130.6 | 4.1 |
| 1658 | 136.7 | 22.4 |
| 1656 | 175.0 | 6.7 |
| 1659 | 193.8 | 21.0 |
| 1649 | 200.0 | 16.3 |
| 1652 | 200.0 | 4.2 |
| 1653 | 200.0 | 8.2 |
| 1657 | 225.0 | 16.0 |
| 1645 | 283.3 | 37.3 |

[0201] Table 1 provides (i) IC₅₀ values for a variety of IL-8 mimetics to show the concentration of a particular IL-8 mimetic that is necessary to provide 50% of the maximal inhibition of ¹²⁵I-IL-8 binding that can be obtained with a particular IL-8 mimetic; and (ii) the maximal inhibition of the percent of ¹²⁵I-IL-8 bound to CXCR2 receptors on differentiated HL-60 cells for both native IL-8 and IL-8 mimetics. The inhibition of ¹²⁵I-IL-8 binding by IL-8 mimetics is indicative of the relative ability of the analogs to bind to CXCR1/CXCR2 receptors.

### Example 3

[0202] The results of calcium mobilization assays are summarized in Table 2 to show the agonistic activation of the IL-8 receptor by the native IL-8 and IL-8 mimetics. The HL-60 cells are cultured as indicated in Example 2, harvested and suspended in Tyrode's salt solution at a density of about 2×10⁶ cells/ml. The Tyrode's salt solution contains about 137 mM NaCl, 2.7 mM KCl, 1 mM MgCl₂, 1 mM CaCl₂, 0.2 mM NaH₂PO₄, 12 mM NaHCO₃, and 5.5 mM glucose.

[0203] The cells are labeled with 4 μM of Fluo-4/AM (Molecular Probes, Inc.) for 45 minutes at 37° C. to measure calcium mobilization from cells. The label is a dye that fluoresces when bound to calcium. The cells are labeled with the dye to obtain a measure of the amount of calcium released by the cells when the cells are treated with the IL-8 mimetic or native IL-8. An increase in fluorescence indicates an increase in calcium mobilization. The cells are washed three times with the Tyrode's salt solution after labeling and re-suspended at 5×10⁶ cells/ml.

[0204] The native IL-8 and IL-8 mimetics are injected to produce a final concentration of about 10 μg/ml to about 200 μg/ml in aliquots containing about 5×10⁵ cells. Changes in the level of cellular fluorescence are read in a Thermo Labsystems Fluorskan Acsent fluorescence plate reader (VWR Scientific Prod's). The controls include cells treated with either the native chemokine or the plain medium of Tyrode's Salt Solution. Data is expressed using 1.0 as the standard level of fluorescence in the plain medium. The reported values represent the mean of at least duplicate measurements from wells in one or more experiments.

[0205] Table 2 provides a summary of the average fold increase of calcium mobilization in differentiated HL-60 cells over the control wells for native IL-8 and IL-8 mimetics.

TABLE 2

| | Average fold increase in |
|---|---|
| SEQ ID NO: | calcium mobilization |
| (Native IL-8) | 2.5 |
| 1664 | 147.5 |
| 1666 | 143.8 |
| 1671 | 134.8 |
| 1663 | 112.9 |
| 1668 | 105.4 |
| 1665 | 103.6 |
| 1661 | 100.6 |
| 1656 | 86.8 |
| 1670 | 65.4 |
| 1647 | 57.3 |
| 1667 | 57.3 |
| 1655 | 41.8 |
| 1646 | 33.9 |
| 1649 | 28.2 |
| 1672 | 13.4 |
| 1675 | 12.2 |
| 1673 | 5.7 |
| 1674 | 1.4 |

[0206] As shown by the data in Table 2, the incubation of the HL-60 cells with the IL-8 mimetics enhanced the receptor-mediated calcium mobilization. Similarly, 10 μg/ml of native IL-8 was used as a positive control that induced a two to three fold increase in calcium mobilization.

### Example 4

[0207] This example illustrates the efficacy of the IL-8 mimetic a161 (SEQ ID NO:1647) (“the test mimetic”) in increasing the number of circulating neutrophils and hematopoietic progenitor/stem cells in a mouse model. The results are shown in FIGS. 2 through 5. The experiments consisted of the following groups of female Balb/c mice (Charles River Lab's): (1) an untreated control group of 10 mice; and (2) test groups of 10 mice each.

[0208] The control and test groups of 20-23 g mice were randomly grouped in appropriately labeled cages and identified by cage markings and ear punch. The test groups were treated one time subcutaneously with the test analog at doses of 1, 5, 10, 15, 20, or 25 mg/kg in volumes of approximately 200 μl. The mice were anesthetized immediately before blood collection. Blood samples were obtained from the mice at 30 minutes, 1 hour, 4 hours, 6 hours, 24 hours and/or 48 hours after administration of the test mimetic. Blood was collected with an EDTA S-Monovette syringe (Sarstedt) and 25G needle through a cardiac puncture. Blood was mixed gently by 5 inversions then expelled into a microcentrifuge tube. Differential and CBC analyses were performed on a Hemavet 850 FS (Drew Scientific). The end-point evaluations included complete blood counts with differentials and haematopoietic progenitor/stem cells as colony forming units (CFU).

[0209] The number of haematopoietic progenitor/stem cells was determined as follows. The volume of blood in each microfuge tube was determined and nine times the volume of ammonium chloride was added. Cells were incubated on ice for 10 minutes to lyse the red blood cells. The cells were washed twice and resuspended in 300 μL of Iscove's Modified Dulbecco's Medium (IMDM) containing 2% fetal bovine serum. The number of nucleated cells per mL of blood was counted, and all cells were plated in duplicate in standard methylcellulose to determine the number of CFUs including the colony-forming unit granulocyte-macrophage (CFU-GM), the burst-forming unit erythroid (BFU-E), and the colony-forming unit granulocyte erythrocyte macrophage megakaryocyte (CFU-GEMM). Plates were incubated for 7-14 days at 37° C. in a fully humidified 5% CO₂-air atmosphere, and colonies containing more than 50 cells were scored using an inverted microscope. The total CFU per mL of blood from the individual mice was determined.

[0210] The differentials were used to evaluate the mobilization of neutrophils and were compared to the untreated control group. A time and concentration dependent increase in neutrophils and haematopoietic progenitor/stem cells in the circulation is shown in FIGS. 2 through 5, indicating the rapid and potent activity of the test analog in vivo.

[0211] FIG. 2 shows the response of circulating neutrophil counts to the administration of varying doses of the test mimetic following one hour of treatment. The test mimetic was administered by subcutaneous injection into female Balb/c mice in amounts of 1, 5, 10, 15, 20, or 25 mg/kg. At 1 hour post-injection, the mice were euthanized and blood was collected by cardiac puncture. Complete blood counts and differentials were determined using a Hemavet. The values represent the mean (+/−) 1 standard deviation of 10 animals per treatment group. Statistically significant elevations as determined using a p value of <0.05 are indicated in FIG. 2 by a “*”.

[0212] FIG. 3 describes the kinetics of the rise in circulating neutrophil counts in response to the administration of the test mimetic. The test mimetic was administered by subcutaneous injection into female Balb/c mice at 25 mg/kg at time intervals of 30 minutes, 1 hour, 4 hours, and 24 hours. The mice were euthanized and blood was collected by cardiac puncture at each time interval. Complete blood counts and differentials were determined using a Hemavet®. The values represent the mean+/−one standard deviation for 10 animals per treatment group. Statistically significant elevations as determined using a p value of <0.05 are indicated in FIG. 3 by a “*”.

[0213] FIG. 4 shows the response of circulating haematopoietic progenitor/stem cells to the administration of varying doses of the test mimetic. The test mimetic was administered by subcutaneous injection into female Balb/c mice in amounts of 1, 5, 10, 15, 20, and 25 mg/kg. At 1 hour post-injection, the mice were euthanized and blood was collected by cardiac puncture. The number of hematopoietic progenitor/stem cells (colony forming unit granulocyte-macrophage (CFU-GM), burst-forming unit erythroid (BFU-E) and colony forming unit granulocyte erythrocyte macrophage megakaryocyte (CFU-GEMM)) was determined by growing the cells in methylcellulose and counting the number of respective colonies. The values represent the mean+/−one standard deviation for 10 animals per treatment group. Statistically significant elevations as determined using a p value of <0.05 are indicated in FIG. 4 by a “*”.

[0214] FIG. 5 describes the kinetics of the rise in haematopoietic progenitor/stem cells in response to the administration of the test mimetic. The test mimetic was administered by subcutaneous injection into female Balb/c mice at 25 mg/kg. At 30 minutes, 1 hour, 4 hours, 6 hours, 24 hours or 48 hours post-injection, mice were euthanized and blood collected by cardiac puncture. The number of haematopoietic progenitor/stem cells as measured by colony forming unit granulocyte-macrophage (CFU-GM), burst-forming unit erythroid (BFU-E), and colony forming unit granulocyte erythrocyte macrophage megakaryocyte (CFU-GEMM) were determined by growing the cells in methylcellulose and counting the number of respective colonies. The values represent the mean (+/−) one standard deviation for 10 animals per treatment group. Statistically significant elevations as determined using a p value of <0.05 are indicated in FIG. 5 by a “*”.

### Example 5

[0215] Agents can be attached as modifying groups that are pendant or in-chain with an IL-8 mimetic. A trifunctional amino acid, for example, can be incorporated into the IL-8 mimetic as a linker and the third functionality can be connected to an agent. Protecting groups can be used to selectively attach an agent to the trifunctional amino acid. Benzyl esters are one type of protecting group that can be used for a lysine carboxyl, for example, and t-butoxycarbonyl can be used for amino groups such as, for example, the amino group in glutamic acid.

[0216] Amino, hydroxyl and carboxyl groups can be used, for example, as a connecting site for agents. Carboxyl groups can be used as a connecting site for agents having, for example, amino, hydroxyl, or thiol groups. Coupling agents include, but are not limited to, 1-ethyl-3(3-dimethylaminopropyl)carbodiimide (EDC) and 1,3-dicyclohexylcarbodiimide (DCC).

[0217] An example of an amine functional compound is 4-amino-TEMPO, an antioxidant that can be administered in combination with other therapies such as, for example, radiation therapy. Such an amine functional compound may be connected to a polymer containing free carboxyls such as, for example, the lysine-derived carboxyls, by first activating the carboxyls and coupling the amine in a solvent under agitation. The carboxyls may be activated with, for example, N-hydroxysuccinimide (NHS) and DCC in a solvent such as, for example, THF or chloroform, which produces N-hydroxysuccinimidyl ester. Examples of the solvent that may be used to couple the amine to the carboxyls include, but are not limited to, THF and DMF.

[0218] In some embodiments, the reaction occurs at a temperature ranging from about 5° C. to about 50° C., from about 15° C. to about 35° C., from about 20° C. to about 30° C., or any range therein. In some embodiments, the reaction time ranges from about 0.5 hours to about 24 hours, from about 1 hour to about 18 hours, from about 4 hours to about 16 hours, from about 6 hours to about 12 hours, or any range therein.

[0219] A benzyl ester protecting group can be removed from a lysine carboxyl by hydrogenolysis with hydrogen gas over a catalyst such as, for example, palladium or platinum on carbon. Examples of suitable solvents include, but are not limited to, ethanol, methanol, isopropanol, and THF. The reaction may be conducted under about 1 atm of hydrogen for about 6 hours to about 24 hours, for about 8 hours to about 16 hours, for about 10 hours to about 14 hours, or any range therein.

### Example 6

[0220] A glycosaminoglycan can be connected to an amine functional group as an aldehyde-terminated heparin. An example of an aldehyde-terminated heparin is represented by the following formula:

[chemical structure]

[0221] wherein m is an integer not equal to 0.

[0222] The aldehyde-terminated heparin can be combined with the amine functional group in a DMF/water solvent and subsequently reduced with NaCNBH₃ to produce the following structure:

[chemical structure]

[0223] wherein m is an integer not equal to 0.

### Example 7

[0224] An IL-8 mimetic can be modified with a polyalkylene glycol using a variety of techniques. There are a variety of available PEG sizes and derivatives that are commercially designed for specific applications such as, for example, attachment to a variety of different chemical functionalities including, but not limited to, amines, thiols, hydroxyls, sulfhydryls, and carboxyls.

[0225] In one example, an amine group of an IL-8 can be combined with a carboxyl-terminated PEG (Nektar Corp.) in the presence of, for example, EDC or DCC to form the following structure:

[chemical structure]

[0226] wherein m is an integer not equal to 0.

[0227] In another example, either a succinimidyl derivative of mPEG (Nektar Corp.) or an isocyanate-terminated mPEG (Nektar Corp.) can be combined with an IL-8 mimetic under conditions known to those of skill in the art. In another example, the carboxyl group of an IL-8 mimetic can be activated with, for example, EDC or DCC and combined with an amino-terminated mPEG (Nektar Corp.) In another example, an amine group of an IL-8 mimetic can be combined with a methacrylate-terminated mPEG (Nektar Corp.) in the presence of an initiator capable of undergoing thermal or photolytic free radical decomposition. Examples of suitable initiators include benzyl-N,N-diethyldithiocarbamate or p-xylene-N,N-diethyldithiocarbamate.

[0228] Those skilled in the art will recognize, or be able to ascertain using no more than routine experimentation, that there are many equivalents to the specific embodiments described herein. Such equivalents are intended to be encompassed by the following claims. All publications, patents, and patent applications mentioned in this application are herein incorporated by reference into the specification to the same extent as if each was specifically indicate to be herein incorporated by reference in its entirety.

The application's sequence listing, which the Patent Office published only in electronic form, follows.

SEQUENCE LISTING (1675 sequences)

SEQ ID NO: 1 - protein, 77 aa, Artificial Sequence
  Description of Artificial Sequence: Synthetic peptide
AVIPRSAKELRCQCIKTYSKPFHPKFIKELRVIESGPHCANTEIIVKLSDGRELCLDPKENWVQRVVEKFLKRAENS

SEQ ID NO: 2 - protein, 78 aa, Artificial Sequence
  Description of Artificial Sequence: Synthetic peptide
VPLSRTVRCTCISISNQPVNPPRSLEKLEIIPASQFCPRVEIIATMKKKGEKRCLNPESKAIKNLLKAVSKEMSKRSP

SEQ ID NO: 3 - protein, 69 aa, Artificial Sequence
  Description of Artificial Sequence: Synthetic peptide
SLAADTPTACCFSYTSRQIPQNFIADYFETSSQCSKPGVIFLTKRSRQVCADPSEEWVQKYVSDLELSA

SEQ ID NO: 4 - protein, 68 aa, Artificial Sequence
  Description of Artificial Sequence: Synthetic peptide
SPYSSDTTPCCFAYIARPLPRAHIKEYFYTSGKCSNPAVVFVTRKNRQVCANPEKKWVREYINSLEMS

SEQ ID NO: 5 - protein, 73 aa, Artificial Sequence
  Description of Artificial Sequence: Synthetic peptide
KSMQVPFSRCCFSFAEQEIPLRAILCYRNTSSICSNEGLIFKLKRGKEACALDTVGWVQRHRKMLRHCPSKRK

SEQ ID NO: 6 - skipped

SEQ ID NO: 7 - protein, 76 aa, Artificial Sequence
  Description of Artificial Sequence: Synthetic peptide
QPDAINAPVTCCYNFTNRKISVQRLASYRRITSSKCPKEAVIFKTIVAKEICADPKQKWVQDSMDHLDKQTQTPKT

SEQ ID NO: 8 - protein, 105 aa, Artificial Sequence
  Description of Artificial Sequence: Synthetic peptide
ILPIASSCCTEVSHHISRRLLERVNMCRIQRADGDCDLAAVILHVKRRRICVSPHNHTVKQWMKVQAAKKNGKGNVCHRKKHHGKRNSNRAHQGKHETYGHKTPY

SEQ ID NO: 9 - protein, 15 aa, Artificial Sequence
  Description of Artificial Sequence: Synthetic peptide
  c-term may be amidated
SAKELRCQCIKTYSK

SEQ ID NO: 10 - protein, 15 aa, Artificial Sequence
  Description of Artificial Sequence: Synthetic peptide
  MOD_RES (7)..(7): Any L- or D-natural amino acid and any non-natural amino acid; see specification as filed for detailed description of substitutions, R-groups and preferred embodiments
  MOD_RES (9)..(9): Any L- or D-natural amino acid and any non-natural amino acid; See specification as filed for detailed description of substitutions, R-groups and preferred embodiments
  c-term may be amidated
SAKELRXQXIKTYSK

SEQ ID NO: 11 - protein, 15 aa, Artificial Sequence
  Description of Artificial Sequence: Synthetic peptide
  MOD_RES (1)..(1): Any L- or D-natural amino acid and any non-natural amino acid; see specification as filed for detailed description of substitutions, R-groups and preferred embodiments
  MOD_RES (7)..(7): Any L- or D-natural amino acid and any non-natural amino acid; see specification as filed for detailed description ofsubstitutions, R-groups and preferred embodiments
  MOD_RES (9)..(9): Any L- or D-natural amino acid and any non-natural amino acid; see specification as filed for detailed description of substitutions, R-groups and preferred embodiments
  c-term may be amidated
XAKELRXQXIKTYSK

SEQ ID NO: 12 - protein, 15 aa, Artificial Sequence
  Description of Artificial Sequence: Synthetic peptide
  MOD_RES (2)..(2): Any L- or D-natural amino acid and any non-natural amino acid; see specification as filed for detailed description of substitutions, R-groups and preferred embodiments
  MOD_RES (7)..(7): Any L- or D-natural amino acid and any non-natural amino acid; see specification as filed for detailed description of substitutions, R-groups and preferred embodiments
  MOD_RES (9)..(9): Any L- or D-natural amino acid and any non-natural amino acid; see specification as filed for detailed description of substitutions, R-groups and preferred embodiments
  c-term may be amidated
SXKELRXQXIKTYSK

SEQ ID NO: 13 - protein, 15 aa, Artificial Sequence
  Description of Artificial Sequence: Synthetic peptide
  MOD_RES (3)..(3): Any L- or D-natural amino acid and any non-natural amino acid; see specification as filed for detailed description of substitutions, R-groups and preferred embodiments
  MOD_RES (7)..(7): Any L- or D-natural amino acid and any non-natural amino acid; see specification as filed for detailed description of substitutions, R-groups and preferred embodiments
  MOD_RES (9)..(9): Any L- or D-natural amino acid and any non-natural amino acid; see specification as filed for detailed description of substitutions, R-groups and preferred embodiments
  c-term may be amidated
SAXELRXQXIKTYSK

SEQ ID NO: 14 - protein, 13 aa, Artificial Sequence
  Description of Artificial Sequence: Synthetic peptide
  c-term may be amidated
SAKELRCQCIKTY

SEQ ID NO: 15 - protein, 13 aa, Artificial Sequence
  Description of Artificial Sequence: Synthetic peptide
  MOD_RES (7)..(7): Any L- or D-natural amino acid and any non-natural amino acid; see specification as filed for detailed description of substitutions, R-groups and preferred embodiments
  MOD_RES (9)..(9): Any L- or D-natural amino acid and any non-natural amino acid; see specification as filed for detailed description of substitutions, R-groups and preferred embodiments
  c-term may be amidated
SAKELRXQXIKTY

SEQ ID NO: 16 - protein, 13 aa, Artificial Sequence
  Description of Artificial Sequence: Synthetic peptide
  MOD_RES (1)..(1): Any L- or D-natural amino acid and any non-natural amino acid; see specification as filed for detailed description of substitutions, R-groups and preferred embodiments
  MOD_RES (7)..(7): Any L- or D-natural amino acid and any non-natural amino acid; see specification as filed for detailed description of substitutions, R-groups and preferred embodiments
  MOD_RES (9)..(9): Any L- or D-natural amino acid and any non-natural amino acid; see specification as filed for detailed description of substitutions, R-groups and preferred embodiments
  c-term may be amidated
XAKELRXQXIKTY

SEQ ID NO: 17 - protein, 13 aa, Artificial Sequence
  Description of Artificial Sequence: Synthetic peptide
  MOD_RES (2)..(2): Any L- or D-natural amino acid and any non-natural amino acid; see specification as filed for detailed description of substitutions, R-groups and preferred embodiments
  MOD_RES (7)..(7): Any L- or D-natural amino acid and any non-natural amino acid; see specification as filed for detailed description of substitutions, R-groups and preferred embodiments
  MOD_RES (9)..(9): Any L- or D-natural amino acid and any non-natural amino acid; see specification as filed for detailed description of substitutions, R-groups and preferred embodiments
  c-term may be amidated
SXKELRXQXIKTY

SEQ ID NO: 18 - protein, 13 aa, Artificial Sequence
  Description of Artificial Sequence: Synthetic peptide
  MOD_RES (3)..(3): Any L- or D-natural amino acid and any non-natural amino acid; see specification as filed for detailed description of substitutions, R-groups and preferred embodiments
  MOD_RES (7)..(7): Any L- or D-natural amino acid and any non-natural amino acid; see specification as filed for detailed description of substitutions, R-groups and preferred embodiments
  MOD_RES (9)..(9): Any L- or D-natural amino acid and any non-natural amino acid; see specification as filed for detailed description of substitutions, R-groups and preferred embodiments
  c-term may be amidated
SAXELRXQXIKTY

SEQ ID NO: 19 - protein, 11 aa, Artificial Sequence
  Description of Artificial Sequence: Synthetic peptide
  c-term may be amidated
SAKELRCQCIK

SEQ ID NO: 20 - protein, 11 aa, Artificial Sequence
  Description of Artificial Sequence: Synthetic peptide
  MOD_RES (7)..(7): Any L- or D-natural amino acid and any non-natural amino acid; see specification as filed for detailed description of substitutions, R-groups and preferred embodiments
  MOD_RES (9)..(9): Any L- or D-natural amino acid and any non-natural amino acid; see specification as filed for detailed description of substitutions, R-groups and preferred embodiments
  c-term may be amidated
SAKELRXQXIK

SEQ ID NO: 21 - protein, 11 aa, Artificial Sequence
  Description of Artificial Sequence: Synthetic peptide
  MOD_RES (1)..(1): Any L- or D-natural amino acid and any non-natural amino acid; see specification as filed for detailed description of substitutions, R-groups and preferred embodiments
  MOD_RES (7)..(7): Any L- or D-natural amino acid and any non-natural amino acid; see specification as filed for detailed description of substitutions, R-groups and preferred embodiments
  MOD_RES (9)..(9): Any L- or D-natural amino acid and any non-natural amino acid; see specification as filed for detailed description of substitutions, R-groups and preferred embodiments
  c-term may be amidated
XAKELRXQXIK

SEQ ID NO: 22 - protein, 11 aa, Artificial Sequence
  Description of Artificial Sequence: Synthetic peptide
  MOD_RES (2)..(2): Any L- or D-natural amino acid and any non-natural amino acid; see specification as filed for detailed description of substitutions, R-groups and preferred embodiments
  MOD_RES (7)..(7): Any L- or D-natural amino acid and any non-natural amino acid; see specification as filed for detailed description of substitutions, R-groups and preferred embodiments
  MOD_RES (9)..(9): Any L- or D-natural amino acid and any non-natural amino acid; see specification as filed for detailed description of substitutions, R-groups and preferred embodiments
  c-term may be amidated
SXKELRXQXIK

SEQ ID NO: 23 - protein, 11 aa, Artificial Sequence
  Description of Artificial Sequence: Synthetic peptide
  MOD_RES (3)..(3): Any L- or D-natural amino acid and any non-natural amino acid; see specification as filed for detailed description of substitutions, R-groups and preferred embodiments
  MOD_RES (7)..(7): Any L- or D-natural amino acid and any non-natural amino acid; see specification as filed for detailed description of substitutions, R-groups and preferred embodiments
  MOD_RES (9)..(9): Any L- or D-natural amino acid and any non-natural amino acid; see specification as filed for detailed description of substitutions, R-groups and preferred embodiments
  c-term may be amidated
SAXELRXQXIK

SEQ ID NO: 24 - protein, 25 aa, Artificial Sequence
  Description of Artificial Sequence: Synthetic peptide
  c-term may be amidated
AIKTYSKPFHPKFIKELRVIESGPH

SEQ ID NO: 25 - protein, 16 aa, Artificial Sequence
  Description of Artificial Sequence: Synthetic peptide
  c-term may be amidated
AANTEIIVKLSDGREL

SEQ ID NO: 26 - protein, 22 aa, Artificial Sequence
  Description of Artificial Sequence: Synthetic peptide
  c-term may be amidated
LDPKENWVQRVVEKFLKRAENS

SEQ ID NO: 27 - protein, 35 aa, Artificial Sequence
  Description of Artificial Sequence: Synthetic peptide
  MOD_RES (16)..(19): Any L- or D-natural or non-natural amino acid, and this range may encompass 1 or 4 residues; see specification as filed for detailed description of substitutions, R-groups and preferred embodiments
  c-term may be amidated
SAKELRCQCIKTYSKXXXXNWVQRVVEKFLKRAEN

SEQ ID NO: 28 - protein, 35 aa, Artificial Sequence
  Description of Artificial Sequence: Synthetic peptide
  MOD_RES (7)..(7): Any L- or D-natural amino acid and any non-natural amino acid; see specification as filed for detailed description of substitutions, R-groups and preferred embodiments
  MOD_RES (9)..(9): Any L- or D-natural amino acid and any non-natural amino acid; see specification as filed for detailed description of substitutions, R-groups and preferred embodiments
  MOD_RES (16)..(19): Any L- or D-natural or non-natural amino acid, and this range may encompass 1 or 4 residues; see specification as filed for detailed description of substitutions, R-groups and preferred embodiments
  c-term may be amidated
SAKELRXQXIKTYSKXXXXNWVQRVVEKFLKRAEN

SEQ ID NO: 29 - protein, 35 aa, Artificial Sequence
  Description of Artificial Sequence: Synthetic peptide
  MOD_RES (1)..(1): Any L- or D-natural amino acid and any non-natural amino acid; see specification as filed for detailed description of substitutions, R-groups and preferred embodiments
  MOD_RES (7)..(7): Any L- or D-natural amino acid and any non-natural amino acid; see specification as filed for detailed description of substitutions, R-groups and preferred embodiments
  MOD_RES (9)..(9): Any L- or D-natural amino acid and any non-natural amino acid; see specification as filed for detailed description of substitutions, R-groups and preferred embodiments
  MOD_RES (16)..(19): Any L- or D-natural or non-natural amino acid, and this range may encompass 1 or 4 residues; see specification as filed for detailed description of substitutions, R-groups and preferred embodiments
  c-term may be amidated
XAKELRXQXIKTYSKXXXXNWVQRVVEKFLKRAEN

SEQ ID NO: 30 - protein, 35 aa, Artificial Sequence
  Description of Artificial Sequence: Synthetic peptide
  MOD_RES (2)..(2): Any L- or D-natural amino acid and any non-natural amino acid; see specification as filed for detailed description of substitutions, R-groups and preferred embodiments
  MOD_RES (7)..(7): Any L- or D-natural amino acid and any non-natural amino acid; see specification as filed for detailed description of substitutions, R-groups and preferred embodiments
  MOD_RES (9)..(9): Any L- or D-natural amino acid and any non-natural amino acid; see specification as filed for detailed description of substitutions, R-groups and preferred embodiments
  MOD_RES (16)..(19): Any L- or D-natural or non-natural amino acid, and this range may encompass 1 or 4 residues; see specification as filed for detailed description of substitutions, R-groups and preferred embodiments
  c-term may be amidated
SXKELRXQXIKTYSKXXXXNWVQRVVEKFLKRAEN

SEQ ID NO: 31 - protein, 35 aa, Artificial Sequence
  Description of Artificial Sequence: Synthetic peptide
  MOD_RES (3)..(3): Any L- or D-natural amino acid and any non-natural amino acid; see specification as filed for detailed description of substitutions, R-groups and preferred embodiments
  MOD_RES (7)..(7): Any L- or D-natural amino acid and any non-natural amino acid; see specification as filed for detailed description of substitutions, R-groups and preferred embodiments
  MOD_RES (9)..(9): Any L- or D-natural amino acid and any non-natural amino acid; see specification as filed for detailed description of substitutions, R-groups and preferred embodiments
  MOD_RES (16)..(19): Any L- or D-natural or non-natural amino acid, and this range may encompass 1 or 4 residues; see specification as filed for detailed description of substitutions, R-groups and preferred embodiments
  c-term may be amidated
SAXELRXQXIKTYSKXXXXNWVQRVVEKFLKRAEN

SEQ ID NO: 32 - protein, 35 aa, Artificial Sequence
  Description of Artificial Sequence: Synthetic peptide
  MOD_RES (7)..(7): Any L- or D-natural amino acid and any non-natural amino acid; see specification as filed for detailed description of substitutions, R-groups and preferred embodiments
  MOD_RES (9)..(10): Any L- or D-natural amino acid and any non-natural amino acid; see specification as filed for detailed description of substitutions, R-groups and preferred embodiments
  MOD_RES (16)..(19): Any L- or D-natural or non-natural amino acid, and this range may encompass 1 or 4 residues; see specification as filed for detailed description of substitutions, R-groups and preferred embodiments
  c-term may be amidated
SAKELRXQXXKTYSKXXXXNWVQRVVEKFLKRAEN

SEQ ID NO: 33 - protein, 35 aa, Artificial Sequence
  Description of Artificial Sequence: Synthetic peptide
  MOD_RES (1)..(1): Any L- or D-natural amino acid and any non-natural amino acid; see specification as filed for detailed description of substitutions, R-groups and preferred embodiments
  MOD_RES (7)..(7): Any L- or D-natural amino acid and any non-natural amino acid; see specification as filed for detailed description of substitutions, R-groups and preferred embodiments
  MOD_RES (9)..(10): Any L- or D-natural amino acid and any non-natural amino acid; see specification as filed for detailed description of substitutions, R-groups and preferred embodiments
  MOD_RES (16)..(19): Any L- or D-natural or non-natural amino acid, and this range may encompass 1 or 4 residues; see specification as filed for detailed description of substitutions, R-groups and preferred embodiments
  c-term may be amidated
XAKELRXQXXKTYSKXXXXNWVQRVVEKFLKRAEN

SEQ ID NO: 34 - protein, 35 aa, Artificial Sequence
  Description of Artificial Sequence: Synthetic peptide
  MOD_RES (2)..(2): Any L- or D-natural amino acid and any non-natural amino acid; see specification as filed for detailed description of substitutions, R-groups and preferred embodiments
  MOD_RES (7)..(7): Any L- or D-natural amino acid and any non-natural amino acid; see specification as filed for detailed description of substitutions, R-groups and preferred embodiments
  MOD_RES (9)..(10): Any L- or D-natural amino acid and any non-natural amino acid; see specification as filed for detailed description of substitutions, R-groups and preferred embodiments
  MOD_RES (16)..(19): Any L- or D-natural or non-natural amino acid, and this range may encompass 1 or 4 residues; see specification as filed for detailed description of substitutions, R-groups and preferred embodiments
  c-term may be amidated
SXKELRXQXXKTYSKXXXXNWVQRVVEKFLKRAEN

SEQ ID NO: 35 - protein, 35 aa, Artificial Sequence
  Description of Artificial Sequence: Synthetic peptide
  MOD_RES (3)..(3): Any L- or D-natural amino acid and any non-natural amino acid; see specification as filed for detailed description of substitutions, R-groups and preferred embodiments
  MOD_RES (7)..(7): Any L- or D-natural amino acid and any non-natural amino acid; see specification as filed for detailed description of substitutions, R-groups and preferred embodiments
  MOD_RES (9)..(10): Any L- or D-natural amino acid and any non-natural amino acid; see specification as filed for detailed description of substitutions, R-groups and preferred embodiments
  MOD_RES (16)..(19): Any L- or D-natural or non-natural amino acid, and this range may encompass 1 or 4 residues; see specification as filed for detailed description of substitutions, R-groups and preferred embodiments
  c-term may be amidated
SAXELRXQXXKTYSKXXXXNWVQRVVEKFLKRAEN

SEQ ID NO: 36 - protein, 35 aa, Artificial Sequence
  Description of Artificial Sequence: Synthetic peptide
  MOD_RES (7)..(7): Any L- or D-natural amino acid and any non-natural amino acid; see specification as filed for detailed description of substitutions, R-groups and preferred embodiments
  MOD_RES (9)..(9): Any L- or D-natural amino acid and any non-natural amino acid; see specification as filed for detailed description of substitutions, R-groups and preferred embodiments
  MOD_RES (11)..(11): Any L- or D-natural amino acid and any non-natural amino acid; see specification as filed for detailed description of substitutions, R-groups and preferred embodiments
  MOD_RES (16)..(19): Any L- or D-natural or non-natural amino acid, and this range may encompass 1 or 4 residues; see specification as filed for detailed description of substitutions, R-groups and preferred embodiments
  c-term may be amidated
SAKELRXQXIXTYSKXXXXNWVQRVVEKFLKRAEN

SEQ ID NO: 37 - protein, 35 aa, Artificial Sequence
  Description of Artificial Sequence: Synthetic peptide
  MOD_RES (1)..(1): Any L- or D-natural amino acid and any non-natural amino acid; see specification as filed for detailed description of substitutions, R-groups and preferred embodiments
  MOD_RES (7)..(7): Any L- or D-natural amino acid and any non-natural amino acid; see specification as filed for detailed description of substitutions, R-groups and preferred embodiments
  MOD_RES (9)..(9): Any L- or D-natural amino acid and any non-natural amino acid; see specification as filed for detailed description of substitutions, R-groups and preferred embodiments
  MOD_RES (11)..(11): Any L- or D-natural amino acid and any non-natural amino acid; see specification as filed for detailed description of substitutions, R-groups and preferred embodiments
  MOD_RES (16)..(19): Any L- or D-natural or non-natural amino acid, and this range may encompass 1 or 4 residues; see specification as filed for detailed description of substitutions, R-groups and preferred embodiments
  c-term may be amidated
XAKELRXQXIXTYSKXXXXNWVQRVVEKFLKRAEN

SEQ ID NO: 38 - protein, 35 aa, Artificial Sequence
  Description of Artificial Sequence: Synthetic peptide
  MOD_RES (2)..(2): Any L- or D-natural amino acid and any non-natural amino acid; see specification as filed for detailed description of substitutions, R-groups and preferred embodiments
  MOD_RES (7)..(7): Any L- or D-natural amino acid and any non-natural amino acid; see specification as filed for detailed description of substitutions, R-groups and preferred embodiments
  MOD_RES (9)..(9): Any L- or D-natural amino acid and any non-natural amino acid; see specification as filed for detailed description of substitutions, R-groups and preferred embodiments
  MOD_RES (11)..(11): Any L- or D-natural amino acid and any non-natural amino acid; see specification as filed for detailed description of substitutions, R-groups and preferred embodiments
  MOD_RES (16)..(19): Any L- or D-natural or non-natural amino acid, and this range may encompass 1 or 4 residues; see specification as filed for detailed description of substitutions, R-groups and preferred embodiments
  c-term may be amidated
SXKELRXQXIXTYSKXXXXNWVQRVVEKFLKRAEN

SEQ ID NO: 39 - protein, 35 aa, Artificial Sequence
  Description of Artificial Sequence: Synthetic peptide
  MOD_RES (3)..(3): Any L- or D-natural amino acid and any non-natural amino acid; see specification as filed for detailed description of substitutions, R-groups and preferred embodiments
  MOD_RES (7)..(7): Any L- or D-natural amino acid and any non-natural amino acid; see specification as filed for detailed description of substitutions, R-groups and preferred embodiments
  MOD_RES (9)..(9): Any L- or D-natural amino acid and any non-natural amino acid; see specification as filed for detailed description of substitutions, R-groups and preferred embodiments
  MOD_RES (11)..(11): Any L- or D-natural amino acid and any non-natural amino acid; see specification as filed for detailed description of substitutions, R-groups and preferred embodiments
  MOD_RES (16)..(19): Any L- or D-natural or non-natural amino acid, and this range may encompass 1 or 4 residues; see specification as filed for detailed description of substitutions, R-groups and preferred embodiments
  c-term may be amidated
SAXELRXQXIXTYSKXXXXNWVQRVVEKFLKRAEN

SEQ ID NO: 40 - protein, 35 aa, Artificial Sequence
  Description of Artificial Sequence: Synthetic peptide
  MOD_RES (7)..(7): Any L- or D-natural amino acid and any non-natural amino acid; see specification as filed for detailed description of substitutions, R-groups and preferred embodiments
  MOD_RES (9)..(9): Any L- or D-natural amino acid and any non-natural amino acid; see specification as filed for detailed description of substitutions, R-groups and preferred embodiments
  MOD_RES (12)..(12): Any L- or D-natural amino acid and any non-natural amino acid; see specification as filed for detailed description of substitutions, R-groups and preferred embodiments
  MOD_RES (16)..(19): Any L- or D-natural or non-natural amino acid, and this range may encompass 1 or 4 residues; see specification as filed for detailed description of substitutions, R-groups and preferred embodiments
  c-term may be amidated
SAKELRXQXIKXYSKXXXXNWVQRVVEKFLKRAEN

SEQ ID NO: 41 - protein, 35 aa, Artificial Sequence
  Description of Artificial Sequence: Synthetic peptide
  MOD_RES (1)..(1): Any L- or D-natural amino acid and any non-natural amino acid; see specification as filed for detailed description of substitutions, R-groups and preferred embodiments
  MOD_RES (7)..(7): Any L- or D-natural amino acid and any non-natural amino acid; see specification as filed for detailed description of substitutions, R-groups and preferred embodiments
  MOD_RES (9)..(9): Any L- or D-natural amino acid and any non-natural amino acid; see specification as filed for detailed description of substitutions, R-groups and preferred embodiments
  MOD_RES (12)..(12): Any L- or D-natural amino acid and any non-natural amino acid; see specification as filed for detailed description of substitutions, R-groups and preferred embodiments
  MOD_RES (16)..(19): Any L- or D-natural or non-natural amino acid, and this range may encompass 1 or 4 residues; see specification as filed for detailed description of substitutions, R-groups and preferred embodiments
  c-term may be amidated
XAKELRXQXIKXYSKXXXXNWVQRVVEKFLKRAEN

SEQ ID NO: 42 - protein, 35 aa, Artificial Sequence
  Description of Artificial Sequence: Synthetic peptide
  MOD_RES (2)..(2): Any L- or D-natural amino acid and any non-natural amino acid; see specification as filed for detailed description of substitutions, R-groups and preferred embodiments
  MOD_RES (7)..(7): Any L- or D-natural amino acid and any non-natural amino acid; see specification as filed for detailed description of substitutions, R-groups and preferred embodiments
  MOD_RES (9)..(9): Any L- or D-natural amino acid and any non-natural amino acid; see specification as filed for detailed description of substitutions, R-groups and preferred embodiments
  MOD_RES (12)..(12): Any L- or D-natural amino acid and any non-natural amino acid; see specification as filed for detailed description of substitutions, R-groups and preferred embodiments
  MOD_RES (16)..(19): Any L- or D-natural or non-natural amino acid, and this range may encompass 1 or 4 residues; see specification as filed for detailed description of substitutions, R-groups and preferred embodiments
  c-term may be amidated
SXKELRXQXIKXYSKXXXXNWVQRVVEKFLKRAEN

SEQ ID NO: 43 - protein, 35 aa, Artificial Sequence
  Description of Artificial Sequence: Synthetic peptide
  MOD_RES (3)..(3): Any L- or D-natural amino acid and any non-natural amino acid; see specification as filed for detailed description of substitutions, R-groups and preferred embodiments
  MOD_RES (7)..(7): Any L- or D-natural amino acid and any non-natural amino acid; see specification as filed for detailed description of substitutions, R-groups and preferred embodiments
  MOD_RES (9)..(9): Any L- or D-natural amino acid and any non-natural amino acid; see specification as filed for detailed description of substitutions, R-groups and preferred embodiments
  MOD_RES (12)..(12): Any L- or D-natural amino acid and any non-natural amino acid; see specification as filed for detailed description of substitutions, R-groups and preferred embodiments
  MOD_RES (16)..(19): Any L- or D-natural or non-natural amino acid, and this range may encompass 1 or 4 residues; see specification as filed for detailed description of substitutions, R-groups and preferred embodiments
  c-term may be amidated
SAXELRXQXIKXYSKXXXXNWVQRVVEKFLKRAEN

SEQ ID NO: 44 - protein, 35 aa, Artificial Sequence
  Description of Artificial Sequence: Synthetic peptide
  MOD_RES (7)..(7): Any L- or D-natural amino acid and any non-natural amino acid; see specification as filed for detailed description of substitutions, R-groups and preferred embodiments
  MOD_RES (9)..(9): Any L- or D-natural amino acid and any non-natural amino acid; see specification as filed for detailed description of substitutions, R-groups and preferred embodiments
  MOD_RES (13)..(13): Any L- or D-natural amino acid and any non-natural amino acid; see specification as filed for detailed description of substitutions, R-groups and preferred embodiments
  MOD_RES (16)..(19): Any L- or D-natural or non-natural amino acid, and this range may encompass 1 or 4 residues; see specification as filed for detailed description of substitutions, R-groups and preferred embodiments
  c-term may be amidated
SAKELRXQXIKTXSKXXXXNWVQRVVEKFLKRAEN

SEQ ID NO: 45 - protein, 35 aa, Artificial Sequence
  Description of Artificial Sequence: Synthetic peptide
  MOD_RES (1)..(1): Any L- or D-natural amino acid and any non-natural amino acid; see specification as filed for detailed description of substitutions, R-groups and preferred embodiments
  MOD_RES (7)..(7): Any L- or D-natural amino acid and any non-natural amino acid; see specification as filed for detailed description of substitutions, R-groups and preferred embodiments
  MOD_RES (9)..(9): Any L- or D-natural amino acid and any non-natural amino acid; see specification as filed for detailed description of substitutions, R-groups and preferred embodiments
  MOD_RES (13)..(13): Any L- or D-natural amino acid and any non-natural amino acid; see specification as filed for detailed description of substitutions, R-groups and preferred embodiments
  MOD_RES (16)..(19): Any L- or D-natural or non-natural amino acid, and this range may encompass 1 or 4 residues; see specification as filed for detailed description of substitutions, R-groups and preferred embodiments
  c-term may be amidated
XAKELRXQXIKTXSKXXXXNWVQRVVEKFLKRAEN

SEQ ID NO: 46 - protein, 35 aa, Artificial Sequence
  Description of Artificial Sequence: Synthetic peptide
  MOD_RES (2)..(2): Any L- or D-natural amino acid and any non-natural amino acid; see specification as filed for detailed description of substitutions, R-groups and preferred embodiments
  MOD_RES (7)..(7): Any L- or D-natural amino acid and any non-natural amino acid; see specification as filed for detailed description of substitutions, R-groups and preferred embodiments
  MOD_RES (9)..(9): Any L- or D-natural amino acid and any non-natural amino acid; see specification as filed for detailed description of substitutions, R-groups and preferred embodiments
  MOD_RES (13)..(13): Any L- or D-natural amino acid and any non-natural amino acid; see specification as filed for detailed description of substitutions, R-groups and preferred embodiments
  MOD_RES (16)..(19): Any L- or D-natural or non-natural amino acid, and this range may encompass 1 or 4 residues; see specification as filed for detailed description of substitutions, R-groups and preferred embodiments
  c-term may be amidated
SXKELRXQXIKTXSKXXXXNWVQRVVEKFLKRAEN

SEQ ID NO: 47 - protein, 35 aa, Artificial Sequence
  Description of Artificial Sequence: Synthetic peptide
  MOD_RES (3)..(3): Any L- or D-natural amino acid and any non-natural amino acid; see specification as filed for detailed description of substitutions, R-groups and preferred embodiments
  MOD_RES (7)..(7): Any L- or D-natural amino acid and any non-natural amino acid; see specification as filed for detailed description of substitutions, R-groups and preferred embodiments
  MOD_RES (9)..(9): Any L- or D-natural amino acid and any non-natural amino acid; see specification as filed for detailed description of substitutions, R-groups and preferred embodiments
  MOD_RES (13)..(13): Any L- or D-natural amino acid and any non-natural amino acid; see specification as filed for detailed description of substitutions, R-groups and preferred embodiments
  MOD_RES (16)..(19): Any L- or D-natural or non-natural amino acid, and this range may encompass 1 or 4 residues; see specification as filed for detailed description of substitutions, R-groups and preferred embodiments
  c-term may be amidated
SAXELRXQXIKTXSKXXXXNWVQRVVEKFLKRAEN

SEQ ID NO: 48 - protein, 35 aa, Artificial Sequence
  Description of Artificial Sequence: Synthetic peptide
  MOD_RES (7)..(7): Any L- or D-natural amino acid and any non-natural amino acid; see specification as filed for detailed description of substitutions, R-groups and preferred embodiments
  MOD_RES (9)..(9): Any L- or D-natural amino acid and any non-natural amino acid; see specification as filed for detailed description of substitutions, R-groups and preferred embodiments
  MOD_RES (14)..(14): Any L- or D-natural amino acid and any non-natural amino acid; see specification as filed for detailed description of substitutions, R-groups and preferred embodiments
  MOD_RES (16)..(19): Any L- or D-natural or non-natural amino acid, and this range may encompass 1 or 4 residues; see specification as filed for detailed description of substitutions, R-groups and preferred embodiments
  c-term may be amidated
SAKELRXQXIKTYXKXXXXNWVQRVVEKFLKRAEN

SEQ ID NO: 49 - protein, 35 aa, Artificial Sequence
  Description of Artificial Sequence: Synthetic peptide
  MOD_RES (1)..(1): Any L- or D-natural amino acid and any non-natural amino acid; see specification as filed for detailed description of substitutions, R-groups and preferred embodiments
  MOD_RES (7)..(7): Any L- or D-natural amino acid and any non-natural amino acid; see specification as filed for detailed description of substitutions, R-groups and preferred embodiments
  MOD_RES (9)..(9): Any L- or D-natural amino acid and any non-natural amino acid; see specification as filed for detailed description of substitutions, R-groups and preferred embodiments
  MOD_RES (14)..(14): Any L- or D-natural amino acid and any non-natural amino acid; see specification as filed for detailed description of substitutions, R-groups and preferred embodiments
  MOD_RES (16)..(19): Any L- or D-natural or non-natural amino acid, and this range may encompass 1 or 4 residues; see specification as filed for detailed description of substitutions, R-groups and preferred embodiments
  c-term may be amidated
XAKELRXQXIKTYXKXXXXNWVQRVVEKFLKRAEN

SEQ ID NO: 50 - protein, 35 aa, Artificial Sequence
  Description of Artificial Sequence: Synthetic peptide
  MOD_RES (2)..(2): Any L- or D-natural amino acid and any non-natural amino acid; see specification as filed for detailed description of substitutions, R-groups and preferred embodiments
  MOD_RES (7)..(7): Any L- or D-natural amino acid and any non-natural amino acid; see specification as filed for detailed description of substitutions, R-groups and preferred embodiments
  MOD_RES (9)..(9): Any L- or D-natural amino acid and any non-natural amino acid; see specification as filed for detailed description of substitutions, R-groups and preferred embodiments
  MOD_RES (14)..(14): Any L- or D-natural amino acid and any non-natural amino acid; see specification as filed for detailed description of substitutions, R-groups and preferred embodiments
  MOD_RES (16)..(19): Any L- or D-natural or non-natural amino acid, and this range may encompass 1 or 4 residues; see specification as filed for detailed description of substitutions, R-groups and preferred embodiments
  c-term may be amidated
SXKELRXQXIKTYXKXXXXNWVQRVVEKFLKRAEN

SEQ ID NO: 51 - protein, 35 aa, Artificial Sequence
  Description of Artificial Sequence: Synthetic peptide
  MOD_RES (3)..(3): Any L- or D-natural amino acid and any non-natural amino acid; see specification as filed for detailed description of substitutions, R-groups and preferred embodiments
  MOD_RES (7)..(7): Any L- or D-natural amino acid and any non-natural amino acid; see specification as filed for detailed description of substitutions, R-groups and preferred embodiments
  MOD_RES (9)..(9): Any L- or D-natural amino acid and any non-natural amino acid; see specification as filed for detailed description of substitutions, R-groups and preferred embodiments
  MOD_RES (14)..(14): Any L- or D-natural amino acid and any non-natural amino acid; see specification as filed for detailed description of substitutions, R-groups and preferred embodiments
  MOD_RES (16)..(19): Any L- or D-natural or non-natural amino acid, and this range may encompass 1 or 4 residues; see specification as filed for detailed description of substitutions, R-groups and preferred embodiments
  c-term may be amidated
SAXELRXQXIKTYXKXXXXNWVQRVVEKFLKRAEN

SEQ ID NO: 52 - protein, 35 aa, Artificial Sequence
  Description of Artificial Sequence: Synthetic peptide
  MOD_RES (7)..(7): Any L- or D-natural amino acid and any non-natural amino acid; see specification as filed for detailed description of substitutions, R-groups and preferred embodiments
  MOD_RES (9)..(9): Any L- or D-natural amino acid and any non-natural amino acid; see specification as filed for detailed description of substitutions, R-groups and preferred embodiments
  MOD_RES (15)..(15): Any L- or D-natural amino acid and any non-natural amino acid; see specification as filed for detailed description of substitutions, R-groups and preferred embodiments
  MOD_RES (16)..(19): Any L- or D-natural or non-natural amino acid, and this range may encompass 1 or 4 residues; see specification as filed for detailed description of substitutions, R-groups and preferred embodiments
  c-term may be amidated
SAKELRXQXIKTYSXXXXXNWVQRVVEKFLKRAEN

SEQ ID NO: 53 - protein, 35 aa, Artificial Sequence
  Description of Artificial Sequence: Synthetic peptide
  MOD_RES (1)..(1): Any L- or D-natural amino acid and any non-natural amino acid; see specification as filed for detailed description of substitutions, R-groups and preferred embodiments
  MOD_RES (7)..(7): Any L- or D-natural amino acid and any non-natural amino acid; see specification as filed for detailed description of substitutions, R-groups and preferred embodiments
  MOD_RES (9)..(9): Any L- or D-natural amino acid and any non-natural amino acid; see specification as filed for detailed description of substitutions, R-groups and preferred embodiments
  MOD_RES (15)..(15): Any L- or D-natural amino acid and any non-natural amino acid; see specification as filed for detailed description of substitutions, R-groups and preferred embodiments
  MOD_RES (16)..(19): Any L- or D-natural or non-natural amino acid, and this range may encompass 1 or 4 residues; see specification as filed for detailed description of substitutions, R-groups and preferred embodiments
  c-term may be amidated
XAKELRXQXIKTYSXXXXXNWVQRVVEKFLKRAEN

SEQ ID NO: 54 - protein, 35 aa, Artificial Sequence
  Description of Artificial Sequence: Synthetic peptide
  MOD_RES (2)..(2): Any L- or D-natural amino acid and any non-natural amino acid; see specification as filed for detailed description of substitutions, R-groups and preferred embodiments
  MOD_RES (7)..(7): Any L- or D-natural amino acid and any non-natural amino acid; see specification as filed for detailed description of substitutions, R-groups and preferred embodiments
  MOD_RES (9)..(9): Any L- or D-natural amino acid and any non-natural amino acid; see specification as filed for detailed description of substitutions, R-groups and preferred embodiments
  MOD_RES (15)..(15): Any L- or D-natural amino acid and any non-natural amino acid; see specification as filed for detailed description of substitutions, R-groups and preferred embodiments
  MOD_RES (16)..(19): Any L- or D-natural or non-natural amino acid, and this range may encompass 1 or 4 residues; see specification as filed for detailed description of substitutions, R-groups and preferred embodiments
  c-term may be amidated
SXKELRXQXIKTYSXXXXXNWVQRVVEKFLKRAEN

SEQ ID NO: 55 - protein, 35 aa, Artificial Sequence
  Description of Artificial Sequence: Synthetic peptide
  MOD_RES (3)..(3): Any L- or D-natural amino acid and any non-natural amino acid; see specification as filed for detailed description of substitutions, R-groups and preferred embodiments
  MOD_RES (7)..(7): Any L- or D-natural amino acid and any non-natural amino acid; see specification as filed for detailed description of substitutions, R-groups and preferred embodiments
  MOD_RES (9)..(9): Any L- or D-natural amino acid and any non-natural amino acid; see specification as filed for detailed description of substitutions, R-groups and preferred embodiments
  MOD_RES (15)..(15): Any L- or D-natural amino acid and any non-natural amino acid; see specification as filed for detailed description of substitutions, R-groups and preferred embodiments
  MOD_RES (16)..(19): Any L- or D-natural or non-natural amino acid, and this range may encompass 1 or 4 residues; see specification as filed for detailed description of substitutions, R-groups and preferred embodiments
  c-term may be amidated
SAXELRXQXIKTYSXXXXXNWVQRVVEKFLKRAEN

SEQ ID NO: 56 - protein, 33 aa, Artificial Sequence
  Description of Artificial Sequence: Synthetic peptide
  MOD_RES (14)..(17): Any L- or D-natural or non-natural amino acid, and this range may encompass 1 or 4 residues; see specification as filed for detailed description of substitutions, R-groups and preferred embodiments
  c-term may be amidated
SAKELRCQCIKTYXXXXNWVQRVVEKFLKRAEN

SEQ ID NO: 57 - protein, 33 aa, Artificial Sequence
  Description of Artificial Sequence: Synthetic peptide
  MOD_RES (7)..(7): Any L- or D-natural amino acid and any non-natural amino acid; see specification as filed for detailed description of substitutions, R-groups and preferred embodiments
  MOD_RES (9)..(9): Any L- or D-natural amino acid and any non-natural amino acid; see specification as filed for detailed description of substitutions, R-groups and preferred embodiments
  MOD_RES (14)..(17): Any L- or D-natural or non-natural amino acid, and this range may encompass 1 or 4 residues; see specification as filed for detailed description of substitutions, R-groups and preferred embodiments
  c-term may be amidated
SAKELRXQXIKTYXXXXNWVQRVVEKFLKRAEN

SEQ ID NO: 58 - protein, 33 aa, Artificial Sequence
  Description of Artificial Sequence: Synthetic peptide
  MOD_RES (1)..(1): Any L- or D-natural amino acid and any non-natural amino acid; see specification as filed for detailed description of substitutions, R-groups and preferred embodiments
  MOD_RES (7)..(7): Any L- or D-natural amino acid and any non-natural amino acid; see specification as filed for detailed description of substitutions, R-groups and preferred embodiments
  MOD_RES (9)..(9): Any L- or D-natural amino acid and any non-natural amino acid; see specification as filed for detailed description of substitutions, R-groups and preferred embodiments
  MOD_RES (14)..(17): Any L- or D-natural or non-natural amino acid, and this range may encompass 1 or 4 residues; see specification as filed for detailed description of substitutions, R-groups and preferred embodiments
  c-term may be amidated
XAKELRXQXIKTYXXXXNWVQRVVEKFLKRAEN

SEQ ID NO: 59 - protein, 33 aa, Artificial Sequence
  Description of Artificial Sequence: Synthetic peptide
  MOD_RES (2)..(2): Any L- or D-natural amino acid and any non-natural amino acid; see specification as filed for detailed description of substitutions, R-groups and preferred embodiments
  MOD_RES (7)..(7): Any L- or D-natural amino acid and any non-natural amino acid; see specification as filed for detailed description of substitutions, R-groups and preferred embodiments
  MOD_RES (9)..(9): Any L- or D-natural amino acid and any non-natural amino acid; see specification as filed for detailed description of substitutions, R-groups and preferred embodiments
  MOD_RES (14)..(17): Any L- or D-natural or non-natural amino acid, and this range may encompass 1 or 4 residues; see specification as filed for detailed description of substitutions, R-groups and preferred embodiments
  c-term may be amidated
SXKELRXQXIKTYXXXXNWVQRVVEKFLKRAEN

SEQ ID NO: 60 - protein, 33 aa, Artificial Sequence
  Description of Artificial Sequence: Synthetic peptide
  MOD_RES (3)..(3): Any L- or D-natural amino acid and any non-natural amino acid; see specification as filed for detailed description of substitutions, R-groups and preferred embodiments
  MOD_RES (7)..(7): Any L- or D-natural amino acid and any non-natural amino acid; see specification as filed for detailed description of substitutions, R-groups and preferred embodiments
  MOD_RES (9)..(9): Any L- or D-natural amino acid and any non-natural amino acid; see specification as filed for detailed description of substitutions, R-groups and preferred embodiments
  MOD_RES (14)..(17): Any L- or D-natural or non-natural amino acid, and this range may encompass 1 or 4 residues; see specification as filed for detailed description of substitutions, R-groups and preferred embodiments
  c-term may be amidated
SAXELRXQXIKTYXXXXNWVQRVVEKFLKRAEN

SEQ ID NO: 61 - protein, 33 aa, Artificial Sequence
  Description of Artificial Sequence: Synthetic peptide
  MOD_RES (7)..(7): Any L- or D-natural amino acid and any non-natural amino acid; see specification as filed for detailed description of substitutions, R-groups and preferred embodiments
  MOD_RES (9)..(10): Any L- or D-natural amino acid and any non-natural amino acid; see specification as filed for detailed description of substitutions, R-groups and preferred embodiments
  MOD_RES (14)..(17): Any L- or D-natural or non-natural amino acid, and this range may encompass 1 or 4 residues; see specification as filed for detailed description of substitutions, R-groups and preferred embodiments
  c-term may be amidated
SAKELRXQXXKTYXXXXNWVQRVVEKFLKRAEN

SEQ ID NO: 62 - protein, 33 aa, Artificial Sequence
  Description of Artificial Sequence: Synthetic peptide
  MOD_RES (1)..(1): Any L- or D-natural amino acid and any non-natural amino acid; see specification as filed for detailed description of substitutions, R-groups and preferred embodiments
  MOD_RES (7)..(7): Any L- or D-natural amino acid and any non-natural amino acid; see specification as filed for detailed description of substitutions, R-groups and preferred embodiments
  MOD_RES (9)..(10): Any L- or D-natural amino acid and any non-natural amino acid; see specification as filed for detailed description of substitutions, R-groups and preferred embodiments
  MOD_RES (14)..(17): Any L- or D-natural or non-natural amino acid, and this range may encompass 1 or 4 residues; see specification as filed for detailed description of substitutions, R-groups and preferred embodiments
  c-term may be amidated
XAKELRXQXXKTYXXXXNWVQRVVEKFLKRAEN

SEQ ID NO: 63 - protein, 33 aa, Artificial Sequence
  Description of Artificial Sequence: Synthetic peptide
  MOD_RES (2)..(2): Any L- or D-natural amino acid and any non-natural amino acid; see specification as filed for detailed description of substitutions, R-groups and preferred embodiments
  MOD_RES (7)..(7): Any L- or D-natural amino acid and any non-natural amino acid; see specification as filed for detailed description of substitutions, R-groups and preferred embodiments
  MOD_RES (9)..(10): Any L- or D-natural amino acid and any non-natural amino acid; see specification as filed for detailed description of substitutions, R-groups and preferred embodiments
  MOD_RES (14)..(17): Any L- or D-natural or non-natural amino acid, and this range may encompass 1 or 4 residues; see specification as filed for detailed description of substitutions, R-groups and preferred embodiments
  c-term may be amidated
SXKELRXQXXKTYXXXXNWVQRVVEKFLKRAEN

SEQ ID NO: 64 - protein, 33 aa, Artificial Sequence
  Description of Artificial Sequence: Synthetic peptide
  MOD_RES (3)..(3): Any L- or D-natural amino acid and any non-natural amino acid; see specification as filed for detailed description of substitutions, R-groups and preferred embodiments
  MOD_RES (7)..(7): Any L- or D-natural amino acid and any non-natural amino acid; see specification as filed for detailed description of substitutions, R-groups and preferred embodiments
  MOD_RES (9)..(10): Any L- or D-natural amino acid and any non-natural amino acid; see specification as filed for detailed description of substitutions, R-groups and preferred embodiments
  MOD_RES (14)..(17): Any L- or D-natural or non-natural amino acid, and this range may encompass 1 or 4 residues; see specification as filed for detailed description of substitutions, R-groups and preferred embodiments
  c-term may be amidated
SAXELRXQXXKTYXXXXNWVQRVVEKFLKRAEN

SEQ ID NO: 65 - protein, 33 aa, Artificial Sequence
  Description of Artificial Sequence: Synthetic peptide
  MOD_RES (7)..(7): Any L- or D-natural amino acid and any non-natural amino acid; see specification as filed for detailed description of substitutions, R-groups and preferred embodiments
  MOD_RES (9)..(9): Any L- or D-natural amino acid and any non-natural amino acid; see specification as filed for detailed description of substitutions, R-groups and preferred embodiments
  MOD_RES (11)..(11): Any L- or D-natural amino acid and any non-natural amino acid; see specification as filed for detailed description of substitutions, R-groups and preferred embodiments
  MOD_RES (14)..(17): Any L- or D-natural or non-natural amino acid, and this range may encompass 1 or 4 residues; see specification as filed for detailed description of substitutions, R-groups and preferred embodiments
  c-term may be amidated
SAKELRXQXIXTYXXXXNWVQRVVEKFLKRAEN

SEQ ID NO: 66 - protein, 33 aa, Artificial Sequence
  Description of Artificial Sequence: Synthetic peptide
  MOD_RES (1)..(1): Any L- or D-natural amino acid and any non-natural amino acid; see specification as filed for detailed description of substitutions, R-groups and preferred embodiments
  MOD_RES (7)..(7): Any L- or D-natural amino acid and any non-natural amino acid; see specification as filed for detailed description of substitutions, R-groups and preferred embodiments
  MOD_RES (9)..(9): Any L- or D-natural amino acid and any non-natural amino acid; see specification as filed for detailed description of substitutions, R-groups and preferred embodiments
  MOD_RES (11)..(11): Any L- or D-natural amino acid and any non-natural amino acid; see specification as filed for detailed description of substitutions, R-groups and preferred embodiments
  MOD_RES (14)..(17): Any L- or D-natural or non-natural amino acid, and this range may encompass 1 or 4 residues; see specification as filed for detailed description of substitutions, R-groups and preferred embodiments
  c-term may be amidated
XAKELRXQXIXTYXXXXNWVQRVVEKFLKRAEN

SEQ ID NO: 67 - protein, 33 aa, Artificial Sequence
  Description of Artificial Sequence: Synthetic peptide
  MOD_RES (2)..(2): Any L- or D-natural amino acid and any non-natural amino acid; see specification as filed for detailed description of substitutions, R-groups and preferred embodiments
  MOD_RES (7)..(7): Any L- or D-natural amino acid and any non-natural amino acid; see specification as filed for detailed description of substitutions, R-groups and preferred embodiments
  MOD_RES (9)..(9): Any L- or D-natural amino acid and any non-natural amino acid; see specification as filed for detailed description of substitutions, R-groups and preferred embodiments
  MOD_RES (11)..(11): Any L- or D-natural amino acid and any non-natural amino acid; see specification as filed for detailed description of substitutions, R-groups and preferred embodiments
  MOD_RES (14)..(17): Any L- or D-natural or non-natural amino acid, and this range may encompass 1 or 4 residues; see specification as filed for detailed description of substitutions, R-groups and preferred embodiments
  c-term may be amidated
SXKELRXQXIXTYXXXXNWVQRVVEKFLKRAEN

SEQ ID NO: 68 - protein, 33 aa, Artificial Sequence
  Description of Artificial Sequence: Synthetic peptide
  MOD_RES (3)..(3): Any L- or D-natural amino acid and any non-natural amino acid; see specification as filed for detailed description of substitutions, R-groups and preferred embodiments
  MOD_RES (7)..(7): Any L- or D-natural amino acid and any non-natural amino acid; see specification as filed for detailed description of substitutions, R-groups and preferred embodiments
  MOD_RES (9)..(9): Any L- or D-natural amino acid and any non-natural amino acid; see specification as filed for detailed description of substitutions, R-groups and preferred embodiments
  MOD_RES (11)..(11): Any L- or D-natural amino acid and any non-natural amino acid; see specification as filed for detailed description of substitutions, R-groups and preferred embodiments
  MOD_RES (14)..(17): Any L- or D-natural or non-natural amino acid, and this range may encompass 1 or 4 residues; see specification as filed for detailed description of substitutions, R-groups and preferred embodiments
  c-term may be amidated
SAXELRXQXIXTYXXXXNWVQRVVEKFLKRAEN

SEQ ID NO: 69 - protein, 33 aa, Artificial Sequence
  Description of Artificial Sequence: Synthetic peptide
  MOD_RES (7)..(7): Any L- or D-natural amino acid and any non-natural amino acid; see specification as filed for detailed description of substitutions, R-groups and preferred embodiments
  MOD_RES (9)..(9): Any L- or D-natural amino acid and any non-natural amino acid; see specification as filed for detailed description of substitutions, R-groups and preferred embodiments
  MOD_RES (12)..(12): Any L- or D-natural amino acid and any non-natural amino acid; see specification as filed for detailed description of substitutions, R-groups and preferred embodiments
  MOD_RES (14)..(17): Any L- or D-natural or non-natural amino acid, and this range may encompass 1 or 4 residues; see specification as filed for detailed description of substitutions, R-groups and preferred embodiments
  c-term may be amidated
SAKELRXQXIKXYXXXXNWVQRVVEKFLKRAEN

SEQ ID NO: 70 - protein, 33 aa, Artificial Sequence
  Description of Artificial Sequence: Synthetic peptide
  MOD_RES (1)..(1): Any L- or D-natural amino acid and any non-natural amino acid; see specification as filed for detailed description of substitutions, R-groups and preferred embodiments
  MOD_RES (7)..(7): Any L- or D-natural amino acid and any non-natural amino acid; see specification as filed for detailed description of substitutions, R-groups and preferred embodiments
  MOD_RES (9)..(9): Any L- or D-natural amino acid and any non-natural amino acid; see specification as filed for detailed description of substitutions, R-groups and preferred embodiments
  MOD_RES (12)..(12): Any L- or D-natural amino acid and any non-natural amino acid; see specification as filed for detailed description of substitutions, R-groups and preferred embodiments
  MOD_RES (14)..(17): Any L- or D-natural or non-natural amino acid, and this range may encompass 1 or 4 residues; see specification as filed for detailed description of substitutions, R-groups and preferred embodiments
  c-term may be amidated
XAKELRXQXIKXYXXXXNWVQRVVEKFLKRAEN

SEQ ID NO: 71 - protein, 33 aa, Artificial Sequence
  Description of Artificial Sequence: Synthetic peptide
  MOD_RES (2)..(2): Any L- or D-natural amino acid and any non-natural amino acid; see specification as filed for detailed description of substitutions, R-groups and preferred embodiments
  MOD_RES (7)..(7): Any L- or D-natural amino acid and any non-natural amino acid; see specification as filed for detailed description of substitutions, R-groups and preferred embodiments
  MOD_RES (9)..(9): Any L- or D-natural amino acid and any non-natural amino acid; see specification as filed for detailed description of substitutions, R-groups and preferred embodiments
  MOD_RES (12)..(12): Any L- or D-natural amino acid and any non-natural amino acid; see specification as filed for detailed description of substitutions, R-groups and preferred embodiments
  MOD_RES (14)..(17): Any L- or D-natural or non-natural amino acid, and this range may encompass 1 or 4 residues; see specification as filed for detailed description of substitutions, R-groups and preferred embodiments
  c-term may be amidated
SXKELRXQXIKXYXXXXNWVQRVVEKFLKRAEN

SEQ ID NO: 72 - protein, 33 aa, Artificial Sequence
  Description of Artificial Sequence: Synthetic peptide
  MOD_RES (3)..(3): Any L- or D-natural amino acid and any non-natural amino acid; see specification as filed for detailed description of substitutions, R-groups and preferred embodiments
  MOD_RES (7)..(7): Any L- or D-natural amino acid and any non-natural amino acid; see specification as filed for detailed description of substitutions, R-groups and preferred embodiments
  MOD_RES (9)..(9): Any L- or D-natural amino acid and any non-natural amino acid; see specification as filed for detailed description of substitutions, R-groups and preferred embodiments
  MOD_RES (12)..(12): Any L- or D-natural amino acid and any non-natural amino acid; see specification as filed for detailed description of substitutions, R-groups and preferred embodiments
  MOD_RES (14)..(17): Any L- or D-natural or non-natural amino acid, and this range may encompass 1 or 4 residues; see specification as filed for detailed description of substitutions, R-groups and preferred embodiments
  c-term may be amidated
SAXELRXQXIKXYXXXXNWVQRVVEKFLKRAEN

SEQ ID NO: 73 - protein, 33 aa, Artificial Sequence
  Description of Artificial Sequence: Synthetic peptide
  MOD_RES (7)..(7): Any L- or D-natural amino acid and any non-natural amino acid; see specification as filed for detailed description of substitutions, R-groups and preferred embodiments
  MOD_RES (9)..(9): Any L- or D-natural amino acid and any non-natural amino acid; see specification as filed for detailed description of substitutions, R-groups and preferred embodiments
  MOD_RES (13)..(13): Any L- or D-natural amino acid and any non-natural amino acid; see specification as filed for detailed description of substitutions, R-groups and preferred embodiments
  MOD_RES (14)..(17): Any L- or D-natural or non-natural amino acid, and this range may encompass 1 or 4 residues; see specification as filed for detailed description of substitutions, R-groups and preferred embodiments
  c-term may be amidated
SAKELRXQXIKTXXXXXNWVQRVVEKFLKRAEN

SEQ ID NO: 74 - protein, 33 aa, Artificial Sequence
  Description of Artificial Sequence: Synthetic peptide
  MOD_RES (1)..(1): Any L- or D-natural amino acid and any non-natural amino acid; see specification as filed for detailed description of substitutions, R-groups and preferred embodiments
  MOD_RES (7)..(7): Any L- or D-natural amino acid and any non-natural amino acid; see specification as filed for detailed description of substitutions, R-groups and preferred embodiments
  MOD_RES (9)..(9): Any L- or D-natural amino acid and any non-natural amino acid; see specification as filed for detailed description of substitutions, R-groups and preferred embodiments
  MOD_RES (13)..(13): Any L- or D-natural amino acid and any non-natural amino acid; see specification as filed for detailed description of substitutions, R-groups and preferred embodiments
  MOD_RES (14)..(17): Any L- or D-natural or non-natural amino acid, and this range may encompass 1 or 4 residues; see specification as filed for detailed description of substitutions, R-groups and preferred embodiments
  c-term may be amidated
XAKELRXQXIKTXXXXXNWVQRVVEKFLKRAEN

SEQ ID NO: 75 - protein, 33 aa, Artificial Sequence
  Description of Artificial Sequence: Synthetic peptide
  MOD_RES (2)..(2): Any L- or D-natural amino acid and any non-natural amino acid; see specification as filed for detailed description of substitutions, R-groups and preferred embodiments
  MOD_RES (7)..(7): Any L- or D-natural amino acid and any non-natural amino acid; see specification as filed for detailed description of substitutions, R-groups and preferred embodiments
  MOD_RES (9)..(9): Any L- or D-natural amino acid and any non-natural amino acid; see specification as filed for detailed description of substitutions, R-groups and preferred embodiments
  MOD_RES (13)..(13): Any L- or D-natural amino acid and any non-natural amino acid; see specification as filed for detailed description of substitutions, R-groups and preferred embodiments
  MOD_RES (14)..(17): Any L- or D-natural or non-natural amino acid, and this range may encompass 1 or 4 residues; see specification as filed for detailed description of substitutions, R-groups and preferred embodiments
  c-term may be amidated
SXKELRXQXIKTXXXXXNWVQRVVEKFLKRAEN

SEQ ID NO: 76 - protein, 33 aa, Artificial Sequence
  Description of Artificial Sequence: Synthetic peptide
  MOD_RES (3)..(3): Any L- or D-natural amino acid and any non-natural amino acid; see specification as filed for detailed description of substitutions, R-groups and preferred embodiments
  MOD_RES (7)..(7): Any L- or D-natural amino acid and any non-natural amino acid; see specification as filed for detailed description of substitutions, R-groups and preferred embodiments
  MOD_RES (9)..(9): Any L- or D-natural amino acid and any non-natural amino acid; see specification as filed for detailed description of substitutions, R-groups and preferred embodiments
  MOD_RES (13)..(13): Any L- or D-natural amino acid and any non-natural amino acid; see specification as filed for detailed description of substitutions, R-groups and preferred embodiments
  MOD_RES (14)..(17): Any L- or D-natural or non-natural amino acid, and this range may encompass 1 or 4 residues; see specification as filed for detailed description of substitutions, R-groups and preferred embodiments
  c-term may be amidated
SAXELRXQXIKTXXXXXNWVQRVVEKFLKRAEN

SEQ ID NO: 77 - protein, 31 aa, Artificial Sequence
  Description of Artificial Sequence: Synthetic peptide
  MOD_RES (12)..(15): Any L- or D-natural or non-natural amino acid, and this range may encompass 1 or 4 residues; see specification as filed for detailed description of substitutions, R-groups and preferred embodiments
  c-term may be amidated
SAKELRCQCIKXXXXNWVQRVVEKFLKRAEN

SEQ ID NO: 78 - protein, 31 aa, Artificial Sequence
  Description of Artificial Sequence: Synthetic peptide
  MOD_RES (7)..(7): Any L- or D-natural amino acid and any non-natural amino acid; see specification as filed for detailed description of substitutions, R-groups and preferred embodiments
  MOD_RES (9)..(9): Any L- or D-natural amino acid and any non-natural amino acid; see specification as filed for detailed description of substitutions, R-groups and preferred embodiments
  MOD_RES (12)..(15): Any L- or D-natural or non-natural amino acid, and this range may encompass 1 or 4 residues; see specification as filed for detailed description of substitutions, R-groups and preferred embodiments
  c-term may be amidated
SAKELRXQXIKXXXXNWVQRVVEKFLKRAEN

SEQ ID NO: 79 - protein, 31 aa, Artificial Sequence
  Description of Artificial Sequence: Synthetic peptide
  MOD_RES (1)..(1): Any L- or D-natural amino acid and any non-natural amino acid; see specification as filed for detailed description of substitutions, R-groups and preferred embodiments
  MOD_RES (7)..(7): Any L- or D-natural amino acid and any non-natural amino acid; see specification as filed for detailed description of substitutions, R-groups and preferred embodiments
  MOD_RES (9)..(9): Any L- or D-natural amino acid and any non-natural amino acid; see specification as filed for detailed description of substitutions, R-groups and preferred embodiments
  MOD_RES (12)..(15): Any L- or D-natural or non-natural amino acid, and this range may encompass 1 or 4 residues; see specification as filed for detailed description of substitutions, R-groups and preferred embodiments
  c-term may be amidated
XAKELRXQXIKXXXXNWVQRVVEKFLKRAEN

SEQ ID NO: 80 - protein, 31 aa, Artificial Sequence
  Description of Artificial Sequence: Synthetic peptide
  MOD_RES (2)..(2): Any L- or D-natural amino acid and any non-natural amino acid; see specification as filed for detailed description of substitutions, R-groups and preferred embodiments
  MOD_RES (7)..(7): Any L- or D-natural amino acid and any non-natural amino acid; see specification as filed for detailed description of substitutions, R-groups and preferred embodiments
  MOD_RES (9)..(9): Any L- or D-natural amino acid and any non-natural amino acid; see specification as filed for detailed description of substitutions, R-groups and preferred embodiments
  MOD_RES (12)..(15): Any L- or D-natural or non-natural amino acid, and this range may encompass 1 or 4 residues; see specification as filed for detailed description of substitutions, R-groups and preferred embodiments
  c-term may be amidated
SXKELRXQXIKXXXXNWVQRVVEKFLKRAEN

SEQ ID NO: 81 - protein, 31 aa, Artificial Sequence
  Description of Artificial Sequence: Synthetic peptide
  MOD_RES (3)..(3): Any L- or D-natural amino acid and any non-natural amino acid; see specification as filed for detailed description of substitutions, R-groups and preferred embodiments
  MOD_RES (7)..(7): Any L- or D-natural amino acid and any non-natural amino acid; see specification as filed for detailed description of substitutions, R-groups and preferred embodiments
  MOD_RES (9)..(9): Any L- or D-natural amino acid and any non-natural amino acid; see specification as filed for detailed description of substitutions, R-groups and preferred embodiments
  MOD_RES (12)..(15): Any L- or D-natural or non-natural amino acid, and this range may encompass 1 or 4 residues; see specification as filed for detailed description of substitutions, R-groups and preferred embodiments
  c-term may be amidated
SAXELRXQXIKXXXXNWVQRVVEKFLKRAEN

SEQ ID NO: 82 - protein, 31 aa, Artificial Sequence
  Description of Artificial Sequence: Synthetic peptide
  MOD_RES (7)..(7): Any L- or D-natural amino acid and any non-natural amino acid; see specification as filed for detailed description of substitutions, R-groups and preferred embodiments
  MOD_RES (9)..(10): Any L- or D-natural amino acid and any non-natural amino acid; see specification as filed for detailed description of substitutions, R-groups and preferred embodiments
  MOD_RES (12)..(15): Any L- or D-natural or non-natural amino acid, and this range may encompass 1 or 4 residues; see specification as filed for detailed description of substitutions, R-groups and preferred embodiments
  c-term may be amidated
SAKELRXQXXKXXXXNWVQRVVEKFLKRAEN

SEQ ID NO: 83 - protein, 31 aa, Artificial Sequence
  Description of Artificial Sequence: Synthetic peptide
  MOD_RES (1)..(1): Any L- or D-natural amino acid and any non-natural amino acid; see specification as filed for detailed description of substitutions, R-groups and preferred embodiments
  MOD_RES (7)..(7): Any L- or D-natural amino acid and any non-natural amino acid; see specification as filed for detailed description of substitutions, R-groups and preferred embodiments
  MOD_RES (9)..(10): Any L- or D-natural amino acid and any non-natural amino acid; see specification as filed for detailed description of substitutions, R-groups and preferred embodiments
  MOD_RES (12)..(15): Any L- or D-natural or non-natural amino acid, and this range may encompass 1 or 4 residues; see specification as filed for detailed description of substitutions, R-groups and preferred embodiments
  c-term may be amidated
XAKELRXQXXKXXXXNWVQRVVEKFLKRAEN

SEQ ID NO: 84 - protein, 31 aa, Artificial Sequence
  Description of Artificial Sequence: Synthetic peptide
  MOD_RES (2)..(2): Any L- or D-natural amino acid and any non-natural amino acid; see specification as filed for detailed description of substitutions, R-groups and preferred embodiments
  MOD_RES (7)..(7): Any L- or D-natural amino acid and any non-natural amino acid; see specification as filed for detailed description of substitutions, R-groups and preferred embodiments
  MOD_RES (9)..(10): Any L- or D-natural amino acid and any non-natural amino acid; see specification as filed for detailed description of substitutions, R-groups and preferred embodiments
  MOD_RES (12)..(15): Any L- or D-natural or non-natural amino acid, and this range may encompass 1 or 4 residues; see specification as filed for detailed description of substitutions, R-groups and preferred embodiments
  c-term may be amidated
SXKELRXQXXKXXXXNWVQRVVEKFLKRAEN

SEQ ID NO: 85 - protein, 31 aa, Artificial Sequence
  Description of Artificial Sequence: Synthetic peptide
  MOD_RES (3)..(3): Any L- or D-natural amino acid and any non-natural amino acid; see specification as filed for detailed description of substitutions, R-groups and preferred embodiments
  MOD_RES (7)..(7): Any L- or D-natural amino acid and any non-natural amino acid; see specification as filed for detailed description of substitutions, R-groups and preferred embodiments
  MOD_RES (9)..(10): Any L- or D-natural amino acid and any non-natural amino acid; see specification as filed for detailed description of substitutions, R-groups and preferred embodiments
  MOD_RES (12)..(15): Any L- or D-natural or non-natural amino acid, and this range may encompass 1 or 4 residues; see specification as filed for detailed description of substitutions, R-groups and preferred embodiments
  c-term may be amidated
SAXELRXQXXKXXXXNWVQRVVEKFLKRAEN

SEQ ID NO: 86 - protein, 31 aa, Artificial Sequence
  Description of Artificial Sequence: Synthetic peptide
  MOD_RES (7)..(7): Any L- or D-natural amino acid and any non-natural amino acid; see specification as filed for detailed description of substitutions, R-groups and preferred embodiments
  MOD_RES (9)..(9): Any L- or D-natural amino acid and any non-natural amino acid; see specification as filed for detailed description of substitutions, R-groups and preferred embodiments
  MOD_RES (11)..(11): Any L- or D-natural amino acid and any non-natural amino acid; see specification as filed for detailed description of substitutions, R-groups and preferred embodiments
  MOD_RES (12)..(15): Any L- or D-natural or non-natural amino acid, and this range may encompass 1 or 4 residues; see specification as filed for detailed description of substitutions, R-groups and preferred embodiments
  c-term may be amidated
SAKELRXQXIXXXXXNWVQRVVEKFLKRAEN

SEQ ID NO: 87 - protein, 31 aa, Artificial Sequence
  Description of Artificial Sequence: Synthetic peptide
  MOD_RES (1)..(1): Any L- or D-natural amino acid and any non-natural amino acid; see specification as filed for detailed description of substitutions, R-groups and preferred embodiments
  MOD_RES (7)..(7): Any L- or D-natural amino acid and any non-natural amino acid; see specification as filed for detailed description of substitutions, R-groups and preferred embodiments
  MOD_RES (9)..(9): Any L- or D-natural amino acid and any non-natural amino acid; see specification as filed for detailed description of substitutions, R-groups and preferred embodiments
  MOD_RES (11)..(11): Any L- or D-natural amino acid and any non-natural amino acid; see specification as filed for detailed description of substitutions, R-groups and preferred embodiments
  MOD_RES (12)..(15): Any L- or D-natural or non-natural amino acid, and this range may encompass 1 or 4 residues; see specification as filed for detailed description of substitutions, R-groups and preferred embodiments
  c-term may be amidated
XAKELRXQXIXXXXXNWVQRVVEKFLKRAEN

SEQ ID NO: 88 - protein, 31 aa, Artificial Sequence
  Description of Artificial Sequence: Synthetic peptide
  MOD_RES (2)..(2): Any L- or D-natural amino acid and any non-natural amino acid; see specification as filed for detailed description of substitutions, R-groups and preferred embodiments
  MOD_RES (7)..(7): Any L- or D-natural amino acid and any non-natural amino acid; see specification as filed for detailed description of substitutions, R-groups and preferred embodiments
  MOD_RES (9)..(9): Any L- or D-natural amino acid and any non-natural amino acid; see specification as filed for detailed description of substitutions, R-groups and preferred embodiments
  MOD_RES (11)..(11): Any L- or D-natural amino acid and any non-natural amino acid; see specification as filed for detailed description of substitutions, R-groups and preferred embodiments
  MOD_RES (12)..(15): Any L- or D-natural or non-natural amino acid, and this range may encompass 1 or 4 residues; see specification as filed for detailed description of substitutions, R-groups and preferred embodiments
  c-term may be amidated
SXKELRXQXIXXXXXNWVQRVVEKFLKRAEN

SEQ ID NO: 89 - protein, 31 aa, Artificial Sequence
  Description of Artificial Sequence: Synthetic peptide
  MOD_RES (3)..(3): Any L- or D-natural amino acid and any non-natural amino acid; see specification as filed for detailed description of substitutions, R-groups and preferred embodiments
  MOD_RES (7)..(7): Any L- or D-natural amino acid and any non-natural amino acid; see specification as filed for detailed description of substitutions, R-groups and preferred embodiments
  MOD_RES (9)..(9): Any L- or D-natural amino acid and any non-natural amino acid; see specification as filed for detailed description of substitutions, R-groups and preferred embodiments
  MOD_RES (11)..(11): Any L- or D-natural amino acid and any non-natural amino acid; see specification as filed for detailed description of substitutions, R-groups and preferred embodiments
  MOD_RES (12)..(15): Any L- or D-natural or non-natural amino acid, and this range may encompass 1 or 4 residues; see specification as filed for detailed description of substitutions, R-groups and preferred embodiments
  c-term may be amidated
SAXELRXQXIXXXXXNWVQRVVEKFLKRAEN

SEQ ID NO: 90 - protein, 13 aa, Artificial Sequence
  Description of Artificial Sequence: Synthetic peptide
  MOD_RES (1)..(1): Any L- or D-natural amino acid and any non-natural amino acid; see specification as filed for detailed description of substitutions, R-groups and preferred embodiments
  MOD_RES (7)..(7): Any L- or D-natural amino acid and any non-natural amino acid; see specification as filed for detailed description of substitutions, R-groups and preferred embodiments
  MOD_RES (9)..(9): Any L- or D-natural amino acid and any non-natural amino acid; see specification as filed for detailed description of substitutions, R-groups and preferred embodiments
  MOD_RES (13)..(13): Any L- or D-natural amino acid and any non-natural amino acid; see specification as filed for detailed description of substitutions, R-groups and preferred embodiments
  c-term may be amidated
XAKELRXQXIKTX

SEQ ID NO: 91 - protein, 13 aa, Artificial Sequence
  Description of Artificial Sequence: Synthetic peptide
  MOD_RES (1)..(2): Any L- or D-natural amino acid and any non-natural amino acid; see specification as filed for detailed description of substitutions, R-groups and preferred embodiments
  MOD_RES (7)..(7): Any L- or D-natural amino acid and any non-natural amino acid; see specification as filed for detailed description of substitutions, R-groups and preferred embodiments
  MOD_RES (9)..(9): Any L- or D-natural amino acid and any non-natural amino acid; see specification as filed for detailed description of substitutions, R-groups and preferred embodiments
  MOD_RES (13)..(13): Any L- or D-natural amino acid and any non-natural amino acid; see specification as filed for detailed description of substitutions, R-groups and preferred embodiments
  c-term may be amidated
XXKELRXQXIKTX

SEQ ID NO: 92 - protein, 13 aa, Artificial Sequence
  Description of Artificial Sequence: Synthetic peptide
  MOD_RES (1)..(1): Any L- or D-natural amino acid and any non-natural amino acid; see specification as filed for detailed description of substitutions, R-groups and preferred embodiments
  MOD_RES (3)..(3): Any L- or D-natural amino acid and any non-natural amino acid; see specification as filed for detailed description of substitutions, R-groups and preferred embodiments
  MOD_RES (7)..(7): Any L- or D-natural amino acid and any non-natural amino acid; see specification as filed for detailed description of substitutions, R-groups and preferred embodiments
  MOD_RES (9)..(9): Any L- or D-natural amino acid and any non-natural amino acid; see specification as filed for detailed description of substitutions, R-groups and preferred embodiments
  MOD_RES (13)..(13): Any L- or D-natural amino acid and any non-natural amino acid; see specification as filed for detailed description of substitutions, R-groups and preferred embodiments
  c-term may be amidated
XAXELRXQXIKTX

SEQ ID NO: 93 - protein, 26 aa, Artificial Sequence
  Description of Artificial Sequence: Synthetic peptide
  MOD_RES (1)..(1): Any L- or D-natural amino acid and any non-natural amino acid; see specification as filed for detailed description of substitutions, R-groups and preferred embodiments
  MOD_RES (26)..(26): Any L- or D-natural amino acid and any non-natural amino acid; see specification as filed for detailed description of substitutions, R-groups and preferred embodiments
  c-term may be amidated
XIKTYSKPFHPKFIKELRVIESGPHX

SEQ ID NO: 94 - protein, 17 aa, Artificial Sequence
  Description of Artificial Sequence: Synthetic peptide
  MOD_RES (1)..(1): Any L- or D-natural amino acid and any non-natural amino acid; see specification as filed for detailed description of substitutions, R-groups and preferred embodiments
  MOD_RES (17)..(17): Any L- or D-natural amino acid and any non-natural amino acid; see specification as filed for detailed description of substitutions, R-groups and preferred embodiments
  c-term may be amidated
XANTEIIVKLSDGRELX

SEQ ID NO: 95 - protein, 23 aa, Artificial Sequence
  Description of Artificial Sequence: Synthetic peptide
  MOD_RES (1)..(1): Any L- or D-natural amino acid and any non-natural amino acid; see specification as filed for detailed description of substitutions, R-groups and preferred embodiments
  MOD_RES (23)..(23): Any L- or D-natural amino acid and any non-natural amino acid; see specification as filed for detailed description of substitutions, R-groups and preferred embodiments
  c-term may be amidated
XLDPKENWVQRVVEKFLKRAENX

SEQ ID NO: 96 - protein, 23 aa, Artificial Sequence
  Description of Artificial Sequence: Synthetic peptide
  c-term may be amidated
ALDPKENWVQRVVEKFLKRAENS

SEQ ID NO: 97 - protein, 23 aa, Artificial Sequence
  Description of Artificial Sequence: Synthetic peptide
  c-term may be amidated
ALDPKENWVQRVVEKFLKRAENS

SEQ ID NO: 98 - skipped

SEQ ID NO: 99 - protein, 23 aa, Artificial Sequence
  Description of Artificial Sequence: Synthetic peptide
  c-term may be amidated
ALDPKENWVQRVVEKFLKRAENS

SEQ ID NO: 100 - protein, 35 aa, Artificial Sequence; identical to SEQ ID NO: 27
  Description of Artificial Sequence: Synthetic peptide
  MOD_RES (16)..(19): Any L- or D-natural or non-natural amino acid, and this range may encompass 1 or 4 residues; see specification as filed for detailed description of substitutions, R-groups and preferred embodiments
  c-term may be amidated

SEQ ID NO: 101 - protein, 35 aa, Artificial Sequence; identical to SEQ ID NO: 28
  Description of Artificial Sequence: Synthetic peptide
  MOD_RES (7)..(7): Any L- or D-natural amino acid and any non-natural amino acid; see specification as filed for detailed description of substitutions, R-groups and preferred embodiments
  MOD_RES (9)..(9): Any L- or D-natural amino acid and any non-natural amino acid; see specification as filed for detailed description of substitutions, R-groups and preferred embodiments
  MOD_RES (16)..(19): Any L- or D-natural or non-natural amino acid, and this range may encompass 1 or 4 residues; see specification as filed for detailed description of substitutions, R-groups and preferred embodiments
  c-term may be amidated

SEQ ID NO: 102 - protein, 35 aa, Artificial Sequence; identical to SEQ ID NO: 29
  Description of Artificial Sequence: Synthetic peptide
  MOD_RES (1)..(1): Any L- or D-natural amino acid and any non-natural amino acid; see specification as filed for detailed description of substitutions, R-groups and preferred embodiments
  MOD_RES (7)..(7): Any L- or D-natural amino acid and any non-natural amino acid; see specification as filed for detailed description of substitutions, R-groups and preferred embodiments
  MOD_RES (9)..(9): Any L- or D-natural amino acid and any non-natural amino acid; see specification as filed for detailed description of substitutions, R-groups and preferred embodiments
  MOD_RES (16)..(19): Any L- or D-natural or non-natural amino acid, and this range may encompass 1 or 4 residues; see specification as filed for detailed description of substitutions, R-groups and preferred embodiments
  c-term may be amidated

SEQ ID NO: 103 - protein, 35 aa, Artificial Sequence; identical to SEQ ID NO: 30
  Description of Artificial Sequence: Synthetic peptide
  MOD_RES (2)..(2): Any L- or D-natural amino acid and any non-natural amino acid; see specification as filed for detailed description of substitutions, R-groups and preferred embodiments
  MOD_RES (7)..(7): Any L- or D-natural amino acid and any non-natural amino acid; see specification as filed for detailed description of substitutions, R-groups and preferred embodiments
  MOD_RES (9)..(9): Any L- or D-natural amino acid and any non-natural amino acid; see specification as filed for detailed description of substitutions, R-groups and preferred embodiments
  MOD_RES (16)..(19): Any L- or D-natural or non-natural amino acid, and this range may encompass 1 or 4 residues; see specification as filed for detailed description of substitutions, R-groups and preferred embodiments
  c-term may be amidated

SEQ ID NO: 104 - protein, 35 aa, Artificial Sequence; identical to SEQ ID NO: 31
  Description of Artificial Sequence: Synthetic peptide
  MOD_RES (3)..(3): Any L- or D-natural amino acid and any non-natural amino acid; see specification as filed for detailed description of substitutions, R-groups and preferred embodiments
  MOD_RES (7)..(7): Any L- or D-natural amino acid and any non-natural amino acid; see specification as filed for detailed description of substitutions, R-groups and preferred embodiments
  MOD_RES (9)..(9): Any L- or D-natural amino acid and any non-natural amino acid; see specification as filed for detailed description of substitutions, R-groups and preferred embodiments
  MOD_RES (16)..(19): Any L- or D-natural or non-natural amino acid, and this range may encompass 1 or 4 residues; see specification as filed for detailed description of substitutions, R-groups and preferred embodiments
  c-term may be amidated

SEQ ID NO: 105 - protein, 35 aa, Artificial Sequence; identical to SEQ ID NO: 32
  Description of Artificial Sequence: Synthetic peptide
  MOD_RES (7)..(7): Any L- or D-natural amino acid and any non-natural amino acid; see specification as filed for detailed description of substitutions, R-groups and preferred embodiments
  MOD_RES (9)..(10): Any L- or D-natural amino acid and any non-natural amino acid; see specification as filed for detailed description of substitutions, R-groups and preferred embodiments
  MOD_RES (16)..(19): Any L- or D-natural or non-natural amino acid, and this range may encompass 1 or 4 residues; see specification as filed for detailed description of substitutions, R-groups and preferred embodiments
  c-term may be amidated

SEQ ID NO: 106 - protein, 35 aa, Artificial Sequence; identical to SEQ ID NO: 33
  Description of Artificial Sequence: Synthetic peptide
  MOD_RES (1)..(1): Any L- or D-natural amino acid and any non-natural amino acid; see specification as filed for detailed description of substitutions, R-groups and preferred embodiments
  MOD_RES (7)..(7): Any L- or D-natural amino acid and any non-natural amino acid; see specification as filed for detailed description of substitutions, R-groups and preferred embodiments
  MOD_RES (9)..(10): Any L- or D-natural amino acid and any non-natural amino acid; see specification as filed for detailed description of substitutions, R-groups and preferred embodiments
  MOD_RES (16)..(19): Any L- or D-natural or non-natural amino acid, and this range may encompass 1 or 4 residues; see specification as filed for detailed description of substitutions, R-groups and preferred embodiments
  c-term may be amidated

SEQ ID NO: 107 - protein, 35 aa, Artificial Sequence; identical to SEQ ID NO: 34
  Description of Artificial Sequence: Synthetic peptide
  MOD_RES (2)..(2): Any L- or D-natural amino acid and any non-natural amino acid; see specification as filed for detailed description of substitutions, R-groups and preferred embodiments
  MOD_RES (7)..(7): Any L- or D-natural amino acid and any non-natural amino acid; see specification as filed for detailed description of substitutions, R-groups and preferred embodiments
  MOD_RES (9)..(10): Any L- or D-natural amino acid and any non-natural amino acid; see specification as filed for detailed description of substitutions, R-groups and preferred embodiments
  MOD_RES (16)..(19): Any L- or D-natural or non-natural amino acid, and this range may encompass 1 or 4 residues; see specification as filed for detailed description of substitutions, R-groups and preferred embodiments
  c-term may be amidated

SEQ ID NO: 108 - protein, 35 aa, Artificial Sequence; identical to SEQ ID NO: 35
  Description of Artificial Sequence: Synthetic peptide
  MOD_RES (3)..(3): Any L- or D-natural amino acid and any non-natural amino acid; see specification as filed for detailed description of substitutions, R-groups and preferred embodiments
  MOD_RES (7)..(7): Any L- or D-natural amino acid and any non-natural amino acid; see specification as filed for detailed description of substitutions, R-groups and preferred embodiments
  MOD_RES (9)..(10): Any L- or D-natural amino acid and any non-natural amino acid; see specification as filed for detailed description of substitutions, R-groups and preferred embodiments
  MOD_RES (16)..(19): Any L- or D-natural or non-natural amino acid, and this range may encompass 1 or 4 residues; see specification as filed for detailed description of substitutions, R-groups and preferred embodiments
  c-term may be amidated

SEQ ID NO: 109 - protein, 35 aa, Artificial Sequence; identical to SEQ ID NO: 36
  Description of Artificial Sequence: Synthetic peptide
  MOD_RES (7)..(7): Any L- or D-natural amino acid and any non-natural amino acid; see specification as filed for detailed description of substitutions, R-groups and preferred embodiments
  MOD_RES (9)..(9): Any L- or D-natural amino acid and any non-natural amino acid; see specification as filed for detailed description of substitutions, R-groups and preferred embodiments
  MOD_RES (11)..(11): Any L- or D-natural amino acid and any non-natural amino acid; see specification as filed for detailed description of substitutions, R-groups and preferred embodiments
  MOD_RES (16)..(19): Any L- or D-natural or non-natural amino acid, and this range may encompass 1 or 4 residues; see specification as filed for detailed description of substitutions, R-groups and preferred embodiments
  c-term may be amidated

SEQ ID NO: 110 - protein, 35 aa, Artificial Sequence; identical to SEQ ID NO: 37
  Description of Artificial Sequence: Synthetic peptide
  MOD_RES (1)..(1): Any L- or D-natural amino acid and any non-natural amino acid; see specification as filed for detailed description of substitutions, R-groups and preferred embodiments
  MOD_RES (7)..(7): Any L- or D-natural amino acid and any non-natural amino acid; see specification as filed for detailed description of substitutions, R-groups and preferred embodiments
  MOD_RES (9)..(9): Any L- or D-natural amino acid and any non-natural amino acid; see specification as filed for detailed description of substitutions, R-groups and preferred embodiments
  MOD_RES (11)..(11): Any L- or D-natural amino acid and any non-natural amino acid; see specification as filed for detailed description of substitutions, R-groups and preferred embodiments
  MOD_RES (16)..(19): Any L- or D-natural or non-natural amino acid, and this range may encompass 1 or 4 residues; see specification as filed for detailed description of substitutions, R-groups and preferred embodiments
  c-term may be amidated

SEQ ID NO: 111 - protein, 35 aa, Artificial Sequence; identical to SEQ ID NO: 38
  Description of Artificial Sequence: Synthetic peptide
  MOD_RES (2)..(2): Any L- or D-natural amino acid and any non-natural amino acid; see specification as filed for detailed description of substitutions, R-groups and preferred embodiments
  MOD_RES (7)..(7): Any L- or D-natural amino acid and any non-natural amino acid; see specification as filed for detailed description of substitutions, R-groups and preferred embodiments
  MOD_RES (9)..(9): Any L- or D-natural amino acid and any non-natural amino acid; see specification as filed for detailed description of substitutions, R-groups and preferred embodiments
  MOD_RES (11)..(11): Any L- or D-natural amino acid and any non-natural amino acid; see specification as filed for detailed description of substitutions, R-groups and preferred embodiments
  MOD_RES (16)..(19): Any L- or D-natural or non-natural amino acid, and this range may encompass 1 or 4 residues; see specification as filed for detailed description of substitutions, R-groups and preferred embodiments
  c-term may be amidated

SEQ ID NO: 112 - protein, 35 aa, Artificial Sequence; identical to SEQ ID NO: 39
  Description of Artificial Sequence: Synthetic peptide
  MOD_RES (3)..(3): Any L- or D-natural amino acid and any non-natural amino acid; see specification as filed for detailed description of substitutions, R-groups and preferred embodiments
  MOD_RES (7)..(7): Any L- or D-natural amino acid and any non-natural amino acid; see specification as filed for detailed description of substitutions, R-groups and preferred embodiments
  MOD_RES (9)..(9): Any L- or D-natural amino acid and any non-natural amino acid; see specification as filed for detailed description of substitutions, R-groups and preferred embodiments
  MOD_RES (11)..(11): Any L- or D-natural amino acid and any non-natural amino acid; see specification as filed for detailed description of substitutions, R-groups and preferred embodiments
  MOD_RES (16)..(19): Any L- or D-natural or non-natural amino acid, and this range may encompass 1 or 4 residues; see specification as filed for detailed description of substitutions, R-groups and preferred embodiments
  c-term may be amidated

SEQ ID NO: 113 - protein, 35 aa, Artificial Sequence; identical to SEQ ID NO: 40
  Description of Artificial Sequence: Synthetic peptide
  MOD_RES (7)..(7): Any L- or D-natural amino acid and any non-natural amino acid; see specification as filed for detailed description of substitutions, R-groups and preferred embodiments
  MOD_RES (9)..(9): Any L- or D-natural amino acid and any non-natural amino acid; see specification as filed for detailed description of substitutions, R-groups and preferred embodiments
  MOD_RES (12)..(12): Any L- or D-natural amino acid and any non-natural amino acid; see specification as filed for detailed description of substitutions, R-groups and preferred embodiments
  MOD_RES (16)..(19): Any L- or D-natural or non-natural amino acid, and this range may encompass 1 or 4 residues; see specification as filed for detailed description of substitutions, R-groups and preferred embodiments
  c-term may be amidated

SEQ ID NO: 114 - protein, 35 aa, Artificial Sequence; identical to SEQ ID NO: 41
  Description of Artificial Sequence: Synthetic peptide
  MOD_RES (1)..(1): Any L- or D-natural amino acid and any non-natural amino acid; see specification as filed for detailed description of substitutions, R-groups and preferred embodiments
  MOD_RES (7)..(7): Any L- or D-natural amino acid and any non-natural amino acid; see specification as filed for detailed description of substitutions, R-groups and preferred embodiments
  MOD_RES (9)..(9): Any L- or D-natural amino acid and any non-natural amino acid; see specification as filed for detailed description of substitutions, R-groups and preferred embodiments
  MOD_RES (12)..(12): Any L- or D-natural amino acid and any non-natural amino acid; see specification as filed for detailed description of substitutions, R-groups and preferred embodiments
  MOD_RES (16)..(19): Any L- or D-natural or non-natural amino acid, and this range may encompass 1 or 4 residues; see specification as filed for detailed description of substitutions, R-groups and preferred embodiments
  c-term may be amidated

SEQ ID NO: 115 - protein, 35 aa, Artificial Sequence; identical to SEQ ID NO: 42
  Description of Artificial Sequence: Synthetic peptide
  MOD_RES (2)..(2): Any L- or D-natural amino acid and any non-natural amino acid; see specification as filed for detailed description of substitutions, R-groups and preferred embodiments
  MOD_RES (7)..(7): Any L- or D-natural amino acid and any non-natural amino acid; see specification as filed for detailed description of substitutions, R-groups and preferred embodiments
  MOD_RES (9)..(9): Any L- or D-natural amino acid and any non-natural amino acid; see specification as filed for detailed description of substitutions, R-groups and preferred embodiments
  MOD_RES (12)..(12): Any L- or D-natural amino acid and any non-natural amino acid; see specification as filed for detailed description of substitutions, R-groups and preferred embodiments
  MOD_RES (16)..(19): Any L- or D-natural or non-natural amino acid, and this range may encompass 1 or 4 residues; see specification as filed for detailed description of substitutions, R-groups and preferred embodiments
  c-term may be amidated

SEQ ID NO: 116 - protein, 35 aa, Artificial Sequence; identical to SEQ ID NO: 43
  Description of Artificial Sequence: Synthetic peptide
  MOD_RES (3)..(3): Any L- or D-natural amino acid and any non-natural amino acid; see specification as filed for detailed description of substitutions, R-groups and preferred embodiments
  MOD_RES (7)..(7): Any L- or D-natural amino acid and any non-natural amino acid; see specification as filed for detailed description of substitutions, R-groups and preferred embodiments
  MOD_RES (9)..(9): Any L- or D-natural amino acid and any non-natural amino acid; see specification as filed for detailed description of substitutions, R-groups and preferred embodiments
  MOD_RES (12)..(12): Any L- or D-natural amino acid and any non-natural amino acid; see specification as filed for detailed description of substitutions, R-groups and preferred embodiments
  MOD_RES (16)..(19): Any L- or D-natural or non-natural amino acid, and this range may encompass 1 or 4 residues; see specification as filed for detailed description of substitutions, R-groups and preferred embodiments
  c-term may be amidated

SEQ ID NO: 117 - protein, 35 aa, Artificial Sequence; identical to SEQ ID NO: 44
  Description of Artificial Sequence: Synthetic peptide
  MOD_RES (7)..(7): Any L- or D-natural amino acid and any non-natural amino acid; see specification as filed for detailed description of substitutions, R-groups and preferred embodiments
  MOD_RES (9)..(9): Any L- or D-natural amino acid and any non-natural amino acid; see specification as filed for detailed description of substitutions, R-groups and preferred embodiments
  MOD_RES (13)..(13): Any L- or D-natural amino acid and any non-natural amino acid; see specification as filed for detailed description of substitutions, R-groups and preferred embodiments
  MOD_RES (16)..(19): Any L- or D-natural or non-natural amino acid, and this range may encompass 1 or 4 residues; see specification as filed for detailed description of substitutions, R-groups and preferred embodiments
  c-term may be amidated

SEQ ID NO: 118 - protein, 35 aa, Artificial Sequence; identical to SEQ ID NO: 45
  Description of Artificial Sequence: Synthetic peptide
  MOD_RES (1)..(1): Any L- or D-natural amino acid and any non-natural amino acid; see specification as filed for detailed description of substitutions, R-groups and preferred embodiments
  MOD_RES (7)..(7): Any L- or D-natural amino acid and any non-natural amino acid; see specification as filed for detailed description of substitutions, R-groups and preferred embodiments
  MOD_RES (9)..(9): Any L- or D-natural amino acid and any non-natural amino acid; see specification as filed for detailed description of substitutions, R-groups and preferred embodiments
  MOD_RES (13)..(13): Any L- or D-natural amino acid and any non-natural amino acid; see specification as filed for detailed description of substitutions, R-groups and preferred embodiments
  MOD_RES (16)..(19): Any L- or D-natural or non-natural amino acid, and this range may encompass 1 or 4 residues; see specification as filed for detailed description of substitutions, R-groups and preferred embodiments
  c-term may be amidated

SEQ ID NO: 119 - protein, 35 aa, Artificial Sequence; identical to SEQ ID NO: 46
  Description of Artificial Sequence: Synthetic peptide
  MOD_RES (2)..(2): Any L- or D-natural amino acid and any non-natural amino acid; see specification as filed for detailed description of substitutions, R-groups and preferred embodiments
  MOD_RES (7)..(7): Any L- or D-natural amino acid and any non-natural amino acid; see specification as filed for detailed description of substitutions, R-groups and preferred embodiments
  MOD_RES (9)..(9): Any L- or D-natural amino acid and any non-natural amino acid; see specification as filed for detailed description of substitutions, R-groups and preferred embodiments
  MOD_RES (13)..(13): Any L- or D-natural amino acid and any non-natural amino acid; see specification as filed for detailed description of substitutions, R-groups and preferred embodiments
  MOD_RES (16)..(19): Any L- or D-natural or non-natural amino acid, and this range may encompass 1 or 4 residues; see specification as filed for detailed description of substitutions, R-groups and preferred embodiments
  c-term may be amidated

SEQ ID NO: 120 - protein, 35 aa, Artificial Sequence; identical to SEQ ID NO: 47
  Description of Artificial Sequence: Synthetic peptide
  MOD_RES (3)..(3): Any L- or D-natural amino acid and any non-natural amino acid; see specification as filed for detailed description of substitutions, R-groups and preferred embodiments
  MOD_RES (7)..(7): Any L- or D-natural amino acid and any non-natural amino acid; see specification as filed for detailed description of substitutions, R-groups and preferred embodiments
  MOD_RES (9)..(9): Any L- or D-natural amino acid and any non-natural amino acid; see specification as filed for detailed description of substitutions, R-groups and preferred embodiments
  MOD_RES (13)..(13): Any L- or D-natural amino acid and any non-natural amino acid; see specification as filed for detailed description of substitutions, R-groups and preferred embodiments
  MOD_RES (16)..(19): Any L- or D-natural or non-natural amino acid, and this range may encompass 1 or 4 residues; see specification as filed for detailed description of substitutions, R-groups and preferred embodiments
  c-term may be amidated

SEQ ID NO: 121 - protein, 35 aa, Artificial Sequence; identical to SEQ ID NO: 48
  Description of Artificial Sequence: Synthetic peptide
  MOD_RES (7)..(7): Any L- or D-natural amino acid and any non-natural amino acid; see specification as filed for detailed description of substitutions, R-groups and preferred embodiments
  MOD_RES (9)..(9): Any L- or D-natural amino acid and any non-natural amino acid; see specification as filed for detailed description of substitutions, R-groups and preferred embodiments
  MOD_RES (14)..(14): Any L- or D-natural amino acid and any non-natural amino acid; see specification as filed for detailed description of substitutions, R-groups and preferred embodiments
  MOD_RES (16)..(19): Any L- or D-natural or non-natural amino acid, and this range may encompass 1 or 4 residues; see specification as filed for detailed description of substitutions, R-groups and preferred embodiments
  c-term may be amidated

SEQ ID NO: 122 - protein, 35 aa, Artificial Sequence; identical to SEQ ID NO: 49
  Description of Artificial Sequence: Synthetic peptide
  MOD_RES (1)..(1): Any L- or D-natural amino acid and any non-natural amino acid; see specification as filed for detailed description of substitutions, R-groups and preferred embodiments
  MOD_RES (7)..(7): Any L- or D-natural amino acid and any non-natural amino acid; see specification as filed for detailed description of substitutions, R-groups and preferred embodiments
  MOD_RES (9)..(9): Any L- or D-natural amino acid and any non-natural amino acid; see specification as filed for detailed description of substitutions, R-groups and preferred embodiments
  MOD_RES (14)..(14): Any L- or D-natural amino acid and any non-natural amino acid; see specification as filed for detailed description of substitutions, R-groups and preferred embodiments
  MOD_RES (16)..(19): Any L- or D-natural or non-natural amino acid, and this range may encompass 1 or 4 residues; see specification as filed for detailed description of substitutions, R-groups and preferred embodiments
  c-term may be amidated

SEQ ID NO: 123 - protein, 35 aa, Artificial Sequence; identical to SEQ ID NO: 50
  Description of Artificial Sequence: Synthetic peptide
  MOD_RES (2)..(2): Any L- or D-natural amino acid and any non-natural amino acid; see specification as filed for detailed description of substitutions, R-groups and preferred embodiments
  MOD_RES (7)..(7): Any L- or D-natural amino acid and any non-natural amino acid; see specification as filed for detailed description of substitutions, R-groups and preferred embodiments
  MOD_RES (9)..(9): Any L- or D-natural amino acid and any non-natural amino acid; see specification as filed for detailed description of substitutions, R-groups and preferred embodiments
  MOD_RES (14)..(14): Any L- or D-natural amino acid and any non-natural amino acid; see specification as filed for detailed description of substitutions, R-groups and preferred embodiments
  MOD_RES (16)..(19): Any L- or D-natural or non-natural amino acid, and this range may encompass 1 or 4 residues; see specification as filed for detailed description of substitutions, R-groups and preferred embodiments
  c-term may be amidated

SEQ ID NO: 124 - protein, 35 aa, Artificial Sequence; identical to SEQ ID NO: 51
  Description of Artificial Sequence: Synthetic peptide
  MOD_RES (3)..(3): Any L- or D-natural amino acid and any non-natural amino acid; see specification as filed for detailed description of substitutions, R-groups and preferred embodiments
  MOD_RES (7)..(7): Any L- or D-natural amino acid and any non-natural amino acid; see specification as filed for detailed description of substitutions, R-groups and preferred embodiments
  MOD_RES (9)..(9): Any L- or D-natural amino acid and any non-natural amino acid; see specification as filed for detailed description of substitutions, R-groups and preferred embodiments
  MOD_RES (14)..(14): Any L- or D-natural amino acid and any non-natural amino acid; see specification as filed for detailed description of substitutions, R-groups and preferred embodiments
  MOD_RES (16)..(19): Any L- or D-natural or non-natural amino acid, and this range may encompass 1 or 4 residues; see specification as filed for detailed description of substitutions, R-groups and preferred embodiments
  c-term may be amidated

SEQ ID NO: 125 - protein, 35 aa, Artificial Sequence; identical to SEQ ID NO: 52
  Description of Artificial Sequence: Synthetic peptide
  MOD_RES (7)..(7): Any L- or D-natural amino acid and any non-natural amino acid; see specification as filed for detailed description of substitutions, R-groups and preferred embodiments
  MOD_RES (9)..(9): Any L- or D-natural amino acid and any non-natural amino acid; see specification as filed for detailed description of substitutions, R-groups and preferred embodiments
  MOD_RES (15)..(15): Any L- or D-natural amino acid and any non-natural amino acid; see specification as filed for detailed description of substitutions, R-groups and preferred embodiments
  MOD_RES (16)..(19): Any L- or D-natural or non-natural amino acid, and this range may encompass 1 or 4 residues; see specification as filed for detailed description of substitutions, R-groups and preferred embodiments
  c-term may be amidated

SEQ ID NO: 126 - protein, 35 aa, Artificial Sequence; identical to SEQ ID NO: 53
  Description of Artificial Sequence: Synthetic peptide
  MOD_RES (1)..(1): Any L- or D-natural amino acid and any non-natural amino acid; see specification as filed for detailed description of substitutions, R-groups and preferred embodiments
  MOD_RES (7)..(7): Any L- or D-natural amino acid and any non-natural amino acid; see specification as filed for detailed description of substitutions, R-groups and preferred embodiments
  MOD_RES (9)..(9): Any L- or D-natural amino acid and any non-natural amino acid; see specification as filed for detailed description of substitutions, R-groups and preferred embodiments
  MOD_RES (15)..(15): Any L- or D-natural amino acid and any non-natural amino acid; see specification as filed for detailed description of substitutions, R-groups and preferred embodiments
  MOD_RES (16)..(19): Any L- or D-natural or non-natural amino acid, and this range may encompass 1 or 4 residues; see specification as filed for detailed description of substitutions, R-groups and preferred embodiments
  c-term may be amidated

SEQ ID NO: 127 - protein, 35 aa, Artificial Sequence; identical to SEQ ID NO: 54
  Description of Artificial Sequence: Synthetic peptide
  MOD_RES (2)..(2): Any L- or D-natural amino acid and any non-natural amino acid; see specification as filed for detailed description of substitutions, R-groups and preferred embodiments
  MOD_RES (7)..(7): Any L- or D-natural amino acid and any non-natural amino acid; see specification as filed for detailed description of substitutions, R-groups and preferred embodiments
  MOD_RES (9)..(9): Any L- or D-natural amino acid and any non-natural amino acid; see specification as filed for detailed description of substitutions, R-groups and preferred embodiments
  MOD_RES (15)..(15): Any L- or D-natural amino acid and any non-natural amino acid; see specification as filed for detailed description of substitutions, R-groups and preferred embodiments
  MOD_RES (16)..(19): Any L- or D-natural or non-natural amino acid, and this range may encompass 1 or 4 residues; see specification as filed for detailed description of substitutions, R-groups and preferred embodiments
  c-term may be amidated

SEQ ID NO: 128 - protein, 35 aa, Artificial Sequence; identical to SEQ ID NO: 55
  Description of Artificial Sequence: Synthetic peptide
  MOD_RES (3)..(3): Any L- or D-natural amino acid and any non-natural amino acid; see specification as filed for detailed description of substitutions, R-groups and preferred embodiments
  MOD_RES (7)..(7): Any L- or D-natural amino acid and any non-natural amino acid; see specification as filed for detailed description of substitutions, R-groups and preferred embodiments
  MOD_RES (9)..(9): Any L- or D-natural amino acid and any non-natural amino acid; see specification as filed for detailed description of substitutions, R-groups and preferred embodiments
  MOD_RES (15)..(15): Any L- or D-natural amino acid and any non-natural amino acid; see specification as filed for detailed description of substitutions, R-groups and preferred embodiments
  MOD_RES (16)..(19): Any L- or D-natural or non-natural amino acid, and this range may encompass 1 or 4 residues; see specification as filed for detailed description of substitutions, R-groups and preferred embodiments
  c-term may be amidated

SEQ ID NO: 129 - protein, 33 aa, Artificial Sequence; identical to SEQ ID NO: 56
  Description of Artificial Sequence: Synthetic peptide
  MOD_RES (14)..(17): Any L- or D-natural or non-natural amino acid, and this range may encompass 1 or 4 residues; see specification as filed for detailed description of substitutions, R-groups and preferred embodiments
  c-term may be amidated

SEQ ID NO: 130 - protein, 33 aa, Artificial Sequence; identical to SEQ ID NO: 57
  Description of Artificial Sequence: Synthetic peptide
  MOD_RES (7)..(7): Any L- or D-natural amino acid and any non-natural amino acid; see specification as filed for detailed description of substitutions, R-groups and preferred embodiments
  MOD_RES (9)..(9): Any L- or D-natural amino acid and any non-natural amino acid; see specification as filed for detailed description of substitutions, R-groups and preferred embodiments
  MOD_RES (14)..(17): Any L- or D-natural or non-natural amino acid, and this range may encompass 1 or 4 residues; see specification as filed for detailed description of substitutions, R-groups and preferred embodiments
  c-term may be amidated

SEQ ID NO: 131 - protein, 33 aa, Artificial Sequence; identical to SEQ ID NO: 58
  Description of Artificial Sequence: Synthetic peptide
  MOD_RES (1)..(1): Any L- or D-natural amino acid and any non-natural amino acid; see specification as filed for detailed description of substitutions, R-groups and preferred embodiments
  MOD_RES (7)..(7): Any L- or D-natural amino acid and any non-natural amino acid; see specification as filed for detailed description of substitutions, R-groups and preferred embodiments
  MOD_RES (9)..(9): Any L- or D-natural amino acid and any non-natural amino acid; see specification as filed for detailed description of substitutions, R-groups and preferred embodiments
  MOD_RES (14)..(17): Any L- or D-natural or non-natural amino acid, and this range may encompass 1 or 4 residues; see specification as filed for detailed description of substitutions, R-groups and preferred embodiments
  c-term may be amidated

SEQ ID NO: 132 - protein, 33 aa, Artificial Sequence; identical to SEQ ID NO: 59
  Description of Artificial Sequence: Synthetic peptide
  MOD_RES (2)..(2): Any L- or D-natural amino acid and any non-natural amino acid; see specification as filed for detailed description of substitutions, R-groups and preferred embodiments
  MOD_RES (7)..(7): Any L- or D-natural amino acid and any non-natural amino acid; see specification as filed for detailed description of substitutions, R-groups and preferred embodiments
  MOD_RES (9)..(9): Any L- or D-natural amino acid and any non-natural amino acid; see specification as filed for detailed description of substitutions, R-groups and preferred embodiments
  MOD_RES (14)..(17): Any L- or D-natural or non-natural amino acid, and this range may encompass 1 or 4 residues; see specification as filed for detailed description of substitutions, R-groups and preferred embodiments
  c-term may be amidated

SEQ ID NO: 133 - protein, 33 aa, Artificial Sequence; identical to SEQ ID NO: 60
  Description of Artificial Sequence: Synthetic peptide
  MOD_RES (3)..(3): Any L- or D-natural amino acid and any non-natural amino acid; see specification as filed for detailed description of substitutions, R-groups and preferred embodiments
  MOD_RES (7)..(7): Any L- or D-natural amino acid and any non-natural amino acid; see specification as filed for detailed description of substitutions, R-groups and preferred embodiments
  MOD_RES (9)..(9): Any L- or D-natural amino acid and any non-natural amino acid; see specification as filed for detailed description of substitutions, R-groups and preferred embodiments
  MOD_RES (14)..(17): Any L- or D-natural or non-natural amino acid, and this range may encompass 1 or 4 residues; see specification as filed for detailed description of substitutions, R-groups and preferred embodiments
  c-term may be amidated

SEQ ID NO: 134 - protein, 33 aa, Artificial Sequence; identical to SEQ ID NO: 61
  Description of Artificial Sequence: Synthetic peptide
  MOD_RES (7)..(7): Any L- or D-natural amino acid and any non-natural amino acid; see specification as filed for detailed description of substitutions, R-groups and preferred embodiments
  MOD_RES (9)..(10): Any L- or D-natural amino acid and any non-natural amino acid; see specification as filed for detailed description of substitutions, R-groups and preferred embodiments
  MOD_RES (14)..(17): Any L- or D-natural or non-natural amino acid, and this range may encompass 1 or 4 residues; see specification as filed for detailed description of substitutions, R-groups and preferred embodiments
  c-term may be amidated

SEQ ID NO: 135 - protein, 33 aa, Artificial Sequence; identical to SEQ ID NO: 62
  Description of Artificial Sequence: Synthetic peptide
  MOD_RES (1)..(1): Any L- or D-natural amino acid and any non-natural amino acid; see specification as filed for detailed description of substitutions, R-groups and preferred embodiments
  MOD_RES (7)..(7): Any L- or D-natural amino acid and any non-natural amino acid; see specification as filed for detailed description of substitutions, R-groups and preferred embodiments
  MOD_RES (9)..(10): Any L- or D-natural amino acid and any non-natural amino acid; see specification as filed for detailed description of substitutions, R-groups and preferred embodiments
  MOD_RES (14)..(17): Any L- or D-natural or non-natural amino acid, and this range may encompass 1 or 4 residues; see specification as filed for detailed description of substitutions, R-groups and preferred embodiments
  c-term may be amidated

SEQ ID NO: 136 - protein, 33 aa, Artificial Sequence; identical to SEQ ID NO: 63
  Description of Artificial Sequence: Synthetic peptide
  MOD_RES (2)..(2): Any L- or D-natural amino acid and any non-natural amino acid; see specification as filed for detailed description of substitutions, R-groups and preferred embodiments
  MOD_RES (7)..(7): Any L- or D-natural amino acid and any non-natural amino acid; see specification as filed for detailed description of substitutions, R-groups and preferred embodiments
  MOD_RES (9)..(10): Any L- or D-natural amino acid and any non-natural amino acid; see specification as filed for detailed description of substitutions, R-groups and preferred embodiments
  MOD_RES (14)..(17): Any L- or D-natural or non-natural amino acid, and this range may encompass 1 or 4 residues; see specification as filed for detailed description of substitutions, R-groups and preferred embodiments
  c-term may be amidated

SEQ ID NO: 137 - protein, 33 aa, Artificial Sequence; identical to SEQ ID NO: 64
  Description of Artificial Sequence: Synthetic peptide
  MOD_RES (3)..(3): Any L- or D-natural amino acid and any non-natural amino acid; see specification as filed for detailed description of substitutions, R-groups and preferred embodiments
  MOD_RES (7)..(7): Any L- or D-natural amino acid and any non-natural amino acid; see specification as filed for detailed description of substitutions, R-groups and preferred embodiments
  MOD_RES (9)..(10): Any L- or D-natural amino acid and any non-natural amino acid; see specification as filed for detailed description of substitutions, R-groups and preferred embodiments
  MOD_RES (14)..(17): Any L- or D-natural or non-natural amino acid, and this range may encompass 1 or 4 residues; see specification as filed for detailed description of substitutions, R-groups and preferred embodiments
  c-term may be amidated

SEQ ID NO: 138 - protein, 33 aa, Artificial Sequence; identical to SEQ ID NO: 65
  Description of Artificial Sequence: Synthetic peptide
  MOD_RES (7)..(7): Any L- or D-natural amino acid and any non-natural amino acid; see specification as filed for detailed description of substitutions, R-groups and preferred embodiments
  MOD_RES (9)..(9): Any L- or D-natural amino acid and any non-natural amino acid; see specification as filed for detailed description of substitutions, R-groups and preferred embodiments
  MOD_RES (11)..(11): Any L- or D-natural amino acid and any non-natural amino acid; see specification as filed for detailed description of substitutions, R-groups and preferred embodiments
  MOD_RES (14)..(17): Any L- or D-natural or non-natural amino acid, and this range may encompass 1 or 4 residues; see specification as filed for detailed description of substitutions, R-groups and preferred embodiments
  c-term may be amidated

SEQ ID NO: 139 - protein, 33 aa, Artificial Sequence; identical to SEQ ID NO: 66
  Description of Artificial Sequence: Synthetic peptide
  MOD_RES (1)..(1): Any L- or D-natural amino acid and any non-natural amino acid; see specification as filed for detailed description of substitutions, R-groups and preferred embodiments
  MOD_RES (7)..(7): Any L- or D-natural amino acid and any non-natural amino acid; see specification as filed for detailed description of substitutions, R-groups and preferred embodiments
  MOD_RES (9)..(9): Any L- or D-natural amino acid and any non-natural amino acid; see specification as filed for detailed description of substitutions, R-groups and preferred embodiments
  MOD_RES (11)..(11): Any L- or D-natural amino acid and any non-natural amino acid; see specification as filed for detailed description of substitutions, R-groups and preferred embodiments
  MOD_RES (14)..(17): Any L- or D-natural or non-natural amino acid, and this range may encompass 1 or 4 residues; see specification as filed for detailed description of substitutions, R-groups and preferred embodiments
  c-term may be amidated

SEQ ID NO: 140 - protein, 33 aa, Artificial Sequence; identical to SEQ ID NO: 67
  Description of Artificial Sequence: Synthetic peptide
  MOD_RES (2)..(2): Any L- or D-natural amino acid and any non-natural amino acid; see specification as filed for detailed description of substitutions, R-groups and preferred embodiments
  MOD_RES (7)..(7): Any L- or D-natural amino acid and any non-natural amino acid; see specification as filed for detailed description of substitutions, R-groups and preferred embodiments
  MOD_RES (9)..(9): Any L- or D-natural amino acid and any non-natural amino acid; see specification as filed for detailed description of substitutions, R-groups and preferred embodiments
  MOD_RES (11)..(11): Any L- or D-natural amino acid and any non-natural amino acid; see specification as filed for detailed description of substitutions, R-groups and preferred embodiments
  MOD_RES (14)..(17): Any L- or D-natural or non-natural amino acid, and this range may encompass 1 or 4 residues; see specification as filed for detailed description of substitutions, R-groups and preferred embodiments
  c-term may be amidated

SEQ ID NO: 141 - protein, 33 aa, Artificial Sequence; identical to SEQ ID NO: 68
  Description of Artificial Sequence: Synthetic peptide
  MOD_RES (3)..(3): Any L- or D-natural amino acid and any non-natural amino acid; see specification as filed for detailed description of substitutions, R-groups and preferred embodiments
  MOD_RES (7)..(7): Any L- or D-natural amino acid and any non-natural amino acid; see specification as filed for detailed description of substitutions, R-groups and preferred embodiments
  MOD_RES (9)..(9): Any L- or D-natural amino acid and any non-natural amino acid; see specification as filed for detailed description of substitutions, R-groups and preferred embodiments
  MOD_RES (11)..(11): Any L- or D-natural amino acid and any non-natural amino acid; see specification as filed for detailed description of substitutions, R-groups and preferred embodiments
  MOD_RES (14)..(17): Any L- or D-natural or non-natural amino acid, and this range may encompass 1 or 4 residues; see specification as filed for detailed description of substitutions, R-groups and preferred embodiments
  c-term may be amidated

SEQ ID NO: 142 - protein, 33 aa, Artificial Sequence; identical to SEQ ID NO: 69
  Description of Artificial Sequence: Synthetic peptide
  MOD_RES (7)..(7): Any L- or D-natural amino acid and any non-natural amino acid; see specification as filed for detailed description of substitutions, R-groups and preferred embodiments
  MOD_RES (9)..(9): Any L- or D-natural amino acid and any non-natural amino acid; see specification as filed for detailed description of substitutions, R-groups and preferred embodiments
  MOD_RES (12)..(12): Any L- or D-natural amino acid and any non-natural amino acid; see specification as filed for detailed description of substitutions, R-groups and preferred embodiments
  MOD_RES (14)..(17): Any L- or D-natural or non-natural amino acid, and this range may encompass 1 or 4 residues; see specification as filed for detailed description of substitutions, R-groups and preferred embodiments
  c-term may be amidated

SEQ ID NO: 143 - protein, 33 aa, Artificial Sequence; identical to SEQ ID NO: 70
  Description of Artificial Sequence: Synthetic peptide
  MOD_RES (1)..(1): Any L- or D-natural amino acid and any non-natural amino acid; see specification as filed for detailed description of substitutions, R-groups and preferred embodiments
  MOD_RES (7)..(7): Any L- or D-natural amino acid and any non-natural amino acid; see specification as filed for detailed description of substitutions, R-groups and preferred embodiments
  MOD_RES (9)..(9): Any L- or D-natural amino acid and any non-natural amino acid; see specification as filed for detailed description of substitutions, R-groups and preferred embodiments
  MOD_RES (12)..(12): Any L- or D-natural amino acid and any non-natural amino acid; see specification as filed for detailed description of substitutions, R-groups and preferred embodiments
  MOD_RES (14)..(17): Any L- or D-natural or non-natural amino acid, and this range may encompass 1 or 4 residues; see specification as filed for detailed description of substitutions, R-groups and preferred embodiments
  c-term may be amidated

SEQ ID NO: 144 - protein, 33 aa, Artificial Sequence; identical to SEQ ID NO: 71
  Description of Artificial Sequence: Synthetic peptide
  MOD_RES (2)..(2): Any L- or D-natural amino acid and any non-natural amino acid; see specification as filed for detailed description of substitutions, R-groups and preferred embodiments
  MOD_RES (7)..(7): Any L- or D-natural amino acid and any non-natural amino acid; see specification as filed for detailed description of substitutions, R-groups and preferred embodiments
  MOD_RES (9)..(9): Any L- or D-natural amino acid and any non-natural amino acid; see specification as filed for detailed description of substitutions, R-groups and preferred embodiments
  MOD_RES (12)..(12): Any L- or D-natural amino acid and any non-natural amino acid; see specification as filed for detailed description of substitutions, R-groups and preferred embodiments
  MOD_RES (14)..(17): Any L- or D-natural or non-natural amino acid, and this range may encompass 1 or 4 residues; see specification as filed for detailed description of substitutions, R-groups and preferred embodiments
  c-term may be amidated

SEQ ID NO: 145 - protein, 33 aa, Artificial Sequence; identical to SEQ ID NO: 72
  Description of Artificial Sequence: Synthetic peptide
  MOD_RES (3)..(3): Any L- or D-natural amino acid and any non-natural amino acid; see specification as filed for detailed description of substitutions, R-groups and preferred embodiments
  MOD_RES (7)..(7): Any L- or D-natural amino acid and any non-natural amino acid; see specification as filed for detailed description of substitutions, R-groups and preferred embodiments
  MOD_RES (9)..(9): Any L- or D-natural amino acid and any non-natural amino acid; see specification as filed for detailed description of substitutions, R-groups and preferred embodiments
  MOD_RES (12)..(12): Any L- or D-natural amino acid and any non-natural amino acid; see specification as filed for detailed description of substitutions, R-groups and preferred embodiments
  MOD_RES (14)..(17): Any L- or D-natural or non-natural amino acid, and this range may encompass 1 or 4 residues; see specification as filed for detailed description of substitutions, R-groups and preferred embodiments
  c-term may be amidated

SEQ ID NO: 146 - protein, 33 aa, Artificial Sequence; identical to SEQ ID NO: 73
  Description of Artificial Sequence: Synthetic peptide
  MOD_RES (7)..(7): Any L- or D-natural amino acid and any non-natural amino acid; see specification as filed for detailed description of substitutions, R-groups and preferred embodiments
  MOD_RES (9)..(9): Any L- or D-natural amino acid and any non-natural amino acid; see specification as filed for detailed description of substitutions, R-groups and preferred embodiments
  MOD_RES (13)..(13): Any L- or D-natural amino acid and any non-natural amino acid; see specification as filed for detailed description of substitutions, R-groups and preferred embodiments
  MOD_RES (14)..(17): Any L- or D-natural or non-natural amino acid, and this range may encompass 1 or 4 residues; see specification as filed for detailed description of substitutions, R-groups and preferred embodiments
  c-term may be amidated

SEQ ID NO: 147 - protein, 33 aa, Artificial Sequence; identical to SEQ ID NO: 74
  Description of Artificial Sequence: Synthetic peptide
  MOD_RES (1)..(1): Any L- or D-natural amino acid and any non-natural amino acid; see specification as filed for detailed description of substitutions, R-groups and preferred embodiments
  MOD_RES (7)..(7): Any L- or D-natural amino acid and any non-natural amino acid; see specification as filed for detailed description of substitutions, R-groups and preferred embodiments
  MOD_RES (9)..(9): Any L- or D-natural amino acid and any non-natural amino acid; see specification as filed for detailed description of substitutions, R-groups and preferred embodiments
  MOD_RES (13)..(13): Any L- or D-natural amino acid and any non-natural amino acid; see specification as filed for detailed description of substitutions, R-groups and preferred embodiments
  MOD_RES (14)..(17): Any L- or D-natural or non-natural amino acid, and this range may encompass 1 or 4 residues; see specification as filed for detailed description of substitutions, R-groups and preferred embodiments
  c-term may be amidated

SEQ ID NO: 148 - protein, 33 aa, Artificial Sequence; identical to SEQ ID NO: 75
  Description of Artificial Sequence: Synthetic peptide
  MOD_RES (2)..(2): Any L- or D-natural amino acid and any non-natural amino acid; see specification as filed for detailed description of substitutions, R-groups and preferred embodiments
  MOD_RES (7)..(7): Any L- or D-natural amino acid and any non-natural amino acid; see specification as filed for detailed description of substitutions, R-groups and preferred embodiments
  MOD_RES (9)..(9): Any L- or D-natural amino acid and any non-natural amino acid; see specification as filed for detailed description of substitutions, R-groups and preferred embodiments
  MOD_RES (13)..(13): Any L- or D-natural amino acid and any non-natural amino acid; see specification as filed for detailed description of substitutions, R-groups and preferred embodiments
  MOD_RES (14)..(17): Any L- or D-natural or non-natural amino acid, and this range may encompass 1 or 4 residues; see specification as filed for detailed description of substitutions, R-groups and preferred embodiments
  c-term may be amidated

SEQ ID NO: 149 - protein, 33 aa, Artificial Sequence; identical to SEQ ID NO: 76
  Description of Artificial Sequence: Synthetic peptide
  MOD_RES (3)..(3): Any L- or D-natural amino acid and any non-natural amino acid; see specification as filed for detailed description of substitutions, R-groups and preferred embodiments
  MOD_RES (7)..(7): Any L- or D-natural amino acid and any non-natural amino acid; see specification as filed for detailed description of substitutions, R-groups and preferred embodiments
  MOD_RES (9)..(9): Any L- or D-natural amino acid and any non-natural amino acid; see specification as filed for detailed description of substitutions, R-groups and preferred embodiments
  MOD_RES (13)..(13): Any L- or D-natural amino acid and any non-natural amino acid; see specification as filed for detailed description of substitutions, R-groups and preferred embodiments
  MOD_RES (14)..(17): Any L- or D-natural or non-natural amino acid, and this range may encompass 1 or 4 residues; see specification as filed for detailed description of substitutions, R-groups and preferred embodiments
  c-term may be amidated

SEQ ID NO: 150 - protein, 31 aa, Artificial Sequence; identical to SEQ ID NO: 77
  Description of Artificial Sequence: Synthetic peptide
  MOD_RES (12)..(15): Any L- or D-natural or non-natural amino acid, and this range may encompass 1 or 4 residues; see specification as filed for detailed description of substitutions, R-groups and preferred embodiments
  c-term may be amidated

SEQ ID NO: 151 - protein, 31 aa, Artificial Sequence; identical to SEQ ID NO: 78
  Description of Artificial Sequence: Synthetic peptide
  MOD_RES (7)..(7): Any L- or D-natural amino acid and any non-natural amino acid; see specification as filed for detailed description of substitutions, R-groups and preferred embodiments
  MOD_RES (9)..(9): Any L- or D-natural amino acid and any non-natural amino acid; see specification as filed for detailed description of substitutions, R-groups and preferred embodiments
  MOD_RES (12)..(15): Any L- or D-natural or non-natural amino acid, and this range may encompass 1 or 4 residues; see specification as filed for detailed description of substitutions, R-groups and preferred embodiments
  c-term may be amidated

SEQ ID NO: 152 - protein, 31 aa, Artificial Sequence; identical to SEQ ID NO: 79
  Description of Artificial Sequence: Synthetic peptide
  MOD_RES (1)..(1): Any L- or D-natural amino acid and any non-natural amino acid; see specification as filed for detailed description of substitutions, R-groups and preferred embodiments
  MOD_RES (7)..(7): Any L- or D-natural amino acid and any non-natural amino acid; see specification as filed for detailed description of substitutions, R-groups and preferred embodiments
  MOD_RES (9)..(9): Any L- or D-natural amino acid and any non-natural amino acid; see specification as filed for detailed description of substitutions, R-groups and preferred embodiments
  MOD_RES (12)..(15): Any L- or D-natural or non-natural amino acid, and this range may encompass 1 or 4 residues; see specification as filed for detailed description of substitutions, R-groups and preferred embodiments
  c-term may be amidated

SEQ ID NO: 153 - protein, 31 aa, Artificial Sequence; identical to SEQ ID NO: 80
  Description of Artificial Sequence: Synthetic peptide
  MOD_RES (2)..(2): Any L- or D-natural amino acid and any non-natural amino acid; see specification as filed for detailed description of substitutions, R-groups and preferred embodiments
  MOD_RES (7)..(7): Any L- or D-natural amino acid and any non-natural amino acid; see specification as filed for detailed description of substitutions, R-groups and preferred embodiments
  MOD_RES (9)..(9): Any L- or D-natural amino acid and any non-natural amino acid; see specification as filed for detailed description of substitutions, R-groups and preferred embodiments
  MOD_RES (12)..(15): Any L- or D-natural or non-natural amino acid, and this range may encompass 1 or 4 residues; see specification as filed for detailed description of substitutions, R-groups and preferred embodiments
  c-term may be amidated

SEQ ID NO: 154 - protein, 31 aa, Artificial Sequence; identical to SEQ ID NO: 81
  Description of Artificial Sequence: Synthetic peptide
  MOD_RES (3)..(3): Any L- or D-natural amino acid and any non-natural amino acid; see specification as filed for detailed description of substitutions, R-groups and preferred embodiments
  MOD_RES (7)..(7): Any L- or D-natural amino acid and any non-natural amino acid; see specification as filed for detailed description of substitutions, R-groups and preferred embodiments
  MOD_RES (9)..(9): Any L- or D-natural amino acid and any non-natural amino acid; see specification as filed for detailed description of substitutions, R-groups and preferred embodiments
  MOD_RES (12)..(15): Any L- or D-natural or non-natural amino acid, and this range may encompass 1 or 4 residues; see specification as filed for detailed description of substitutions, R-groups and preferred embodiments
  c-term may be amidated

SEQ ID NO: 155 - protein, 31 aa, Artificial Sequence; identical to SEQ ID NO: 82
  Description of Artificial Sequence: Synthetic peptide
  MOD_RES (7)..(7): Any L- or D-natural amino acid and any non-natural amino acid; see specification as filed for detailed description of substitutions, R-groups and preferred embodiments
  MOD_RES (9)..(10): Any L- or D-natural amino acid and any non-natural amino acid; see specification as filed for detailed description of substitutions, R-groups and preferred embodiments
  MOD_RES (12)..(15): Any L- or D-natural or non-natural amino acid, and this range may encompass 1 or 4 residues; see specification as filed for detailed description of substitutions, R-groups and preferred embodiments
  c-term may be amidated

SEQ ID NO: 156 - protein, 31 aa, Artificial Sequence; identical to SEQ ID NO: 83
  Description of Artificial Sequence: Synthetic peptide
  MOD_RES (1)..(1): Any L- or D-natural amino acid and any non-natural amino acid; see specification as filed for detailed description of substitutions, R-groups and preferred embodiments
  MOD_RES (7)..(7): Any L- or D-natural amino acid and any non-natural amino acid; see specification as filed for detailed description of substitutions, R-groups and preferred embodiments
  MOD_RES (9)..(10): Any L- or D-natural amino acid and any non-natural amino acid; see specification as filed for detailed description of substitutions, R-groups and preferred embodiments
  MOD_RES (12)..(15): Any L- or D-natural or non-natural amino acid, and this range may encompass 1 or 4 residues; see specification as filed for detailed description of substitutions, R-groups and preferred embodiments
  c-term may be amidated

SEQ ID NO: 157 - protein, 31 aa, Artificial Sequence; identical to SEQ ID NO: 84
  Description of Artificial Sequence: Synthetic peptide
  MOD_RES (2)..(2): Any L- or D-natural amino acid and any non-natural amino acid; see specification as filed for detailed description of substitutions, R-groups and preferred embodiments
  MOD_RES (7)..(7): Any L- or D-natural amino acid and any non-natural amino acid; see specification as filed for detailed description of substitutions, R-groups and preferred embodiments
  MOD_RES (9)..(10): Any L- or D-natural amino acid and any non-natural amino acid; see specification as filed for detailed description of substitutions, R-groups and preferred embodiments
  MOD_RES (12)..(15): Any L- or D-natural or non-natural amino acid, and this range may encompass 1 or 4 residues; see specification as filed for detailed description of substitutions, R-groups and preferred embodiments
  c-term may be amidated

SEQ ID NO: 158 - protein, 31 aa, Artificial Sequence; identical to SEQ ID NO: 85
  Description of Artificial Sequence: Synthetic peptide
  MOD_RES (3)..(3): Any L- or D-natural amino acid and any non-natural amino acid; see specification as filed for detailed description of substitutions, R-groups and preferred embodiments
  MOD_RES (7)..(7): Any L- or D-natural amino acid and any non-natural amino acid; see specification as filed for detailed description of substitutions, R-groups and preferred embodiments
  MOD_RES (9)..(10): Any L- or D-natural amino acid and any non-natural amino acid; see specification as filed for detailed description of substitutions, R-groups and preferred embodiments
  MOD_RES (12)..(15): Any L- or D-natural or non-natural amino acid, and this range may encompass 1 or 4 residues; see specification as filed for detailed description of substitutions, R-groups and preferred embodiments
  c-term may be amidated

SEQ ID NO: 159 - protein, 31 aa, Artificial Sequence; identical to SEQ ID NO: 86
  Description of Artificial Sequence: Synthetic peptide
  MOD_RES (7)..(7): Any L- or D-natural amino acid and any non-natural amino acid; see specification as filed for detailed description of substitutions, R-groups and preferred embodiments
  MOD_RES (9)..(9): Any L- or D-natural amino acid and any non-natural amino acid; see specification as filed for detailed description of substitutions, R-groups and preferred embodiments
  MOD_RES (11)..(11): Any L- or D-natural amino acid and any non-natural amino acid; see specification as filed for detailed description of substitutions, R-groups and preferred embodiments
  MOD_RES (12)..(15): Any L- or D-natural or non-natural amino acid, and this range may encompass 1 or 4 residues; see specification as filed for detailed description of substitutions, R-groups and preferred embodiments
  c-term may be amidated

SEQ ID NO: 160 - protein, 31 aa, Artificial Sequence; identical to SEQ ID NO: 87
  Description of Artificial Sequence: Synthetic peptide
  MOD_RES (1)..(1): Any L- or D-natural amino acid and any non-natural amino acid; see specification as filed for detailed description of substitutions, R-groups and preferred embodiments
  MOD_RES (7)..(7): Any L- or D-natural amino acid and any non-natural amino acid; see specification as filed for detailed description of substitutions, R-groups and preferred embodiments
  MOD_RES (9)..(9): Any L- or D-natural amino acid and any non-natural amino acid; see specification as filed for detailed description of substitutions, R-groups and preferred embodiments
  MOD_RES (11)..(11): Any L- or D-natural amino acid and any non-natural amino acid; see specification as filed for detailed description of substitutions, R-groups and preferred embodiments
  MOD_RES (12)..(15): Any L- or D-natural or non-natural amino acid, and this range may encompass 1 or 4 residues; see specification as filed for detailed description of substitutions, R-groups and preferred embodiments
  c-term may be amidated

SEQ ID NO: 161 - protein, 31 aa, Artificial Sequence; identical to SEQ ID NO: 88
  Description of Artificial Sequence: Synthetic peptide
  MOD_RES (2)..(2): Any L- or D-natural amino acid and any non-natural amino acid; see specification as filed for detailed description of substitutions, R-groups and preferred embodiments
  MOD_RES (7)..(7): Any L- or D-natural amino acid and any non-natural amino acid; see specification as filed for detailed description of substitutions, R-groups and preferred embodiments
  MOD_RES (9)..(9): Any L- or D-natural amino acid and any non-natural amino acid; see specification as filed for detailed description of substitutions, R-groups and preferred embodiments
  MOD_RES (11)..(11): Any L- or D-natural amino acid and any non-natural amino acid; see specification as filed for detailed description of substitutions, R-groups and preferred embodiments
  MOD_RES (12)..(15): Any L- or D-natural or non-natural amino acid, and this range may encompass 1 or 4 residues; see specification as filed for detailed description of substitutions, R-groups and preferred embodiments
  c-term may be amidated

SEQ ID NO: 162 - protein, 31 aa, Artificial Sequence; identical to SEQ ID NO: 89
  Description of Artificial Sequence: Synthetic peptide
  MOD_RES (3)..(3): Any L- or D-natural amino acid and any non-natural amino acid; see specification as filed for detailed description of substitutions, R-groups and preferred embodiments
  MOD_RES (7)..(7): Any L- or D-natural amino acid and any non-natural amino acid; see specification as filed for detailed description of substitutions, R-groups and preferred embodiments
  MOD_RES (9)..(9): Any L- or D-natural amino acid and any non-natural amino acid; see specification as filed for detailed description of substitutions, R-groups and preferred embodiments
  MOD_RES (11)..(11): Any L- or D-natural amino acid and any non-natural amino acid; see specification as filed for detailed description of substitutions, R-groups and preferred embodiments
  MOD_RES (12)..(15): Any L- or D-natural or non-natural amino acid, and this range may encompass 1 or 4 residues; see specification as filed for detailed description of substitutions, R-groups and preferred embodiments
  c-term may be amidated

SEQ ID NO: 163 - protein, 14 aa, Artificial Sequence
  Description of Artificial Sequence: Synthetic peptide
  c-term may be amidated
VPLSRTVRCTCISI

SEQ ID NO: 164 - protein, 14 aa, Artificial Sequence
  Description of Artificial Sequence: Synthetic peptide
  MOD_RES (3)..(3): Any L- or D-natural amino acid and any non-natural amino acid; see specification as filed for detailed description of substitutions, R-groups and preferred embodiments
  MOD_RES (9)..(9): Any L- or D-natural amino acid and any non-natural amino acid; see specification as filed for detailed description of substitutions, R-groups and preferred embodiments
  MOD_RES (11)..(11): Any L- or D-natural amino acid and any non-natural amino acid; see specification as filed for detailed description of substitutions, R-groups and preferred embodiments
  c-term may be amidated
VPXSRTVRXTXISI

SEQ ID NO: 165 - protein, 14 aa, Artificial Sequence
  Description of Artificial Sequence: Synthetic peptide
  MOD_RES (4)..(4): Any L- or D-natural amino acid and any non-natural amino acid; see specification as filed for detailed description of substitutions, R-groups and preferred embodiments
  MOD_RES (9)..(9): Any L- or D-natural amino acid and any non-natural amino acid; see specification as filed for detailed description of substitutions, R-groups and preferred embodiments
  MOD_RES (11)..(11): Any L- or D-natural amino acid and any non-natural amino acid; see specification as filed for detailed description of substitutions, R-groups and preferred embodiments
  c-term may be amidated
VPLXRTVRXTXISI

SEQ ID NO: 166 - protein, 14 aa, Artificial Sequence
  Description of Artificial Sequence: Synthetic peptide
  MOD_RES (5)..(5): Any L- or D-natural amino acid and any non-natural amino acid; see specification as filed for detailed description of substitutions, R-groups and preferred embodiments
  MOD_RES (9)..(9): Any L- or D-natural amino acid and any non-natural amino acid; see specification as filed for detailed description of substitutions, R-groups and preferred embodiments
  MOD_RES (11)..(11): Any L- or D-natural amino acid and any non-natural amino acid; see specification as filed for detailed description of substitutions, R-groups and preferred embodiments
  c-term may be amidated
VPLSXTVRXTXISI

SEQ ID NO: 167 - protein, 14 aa, Artificial Sequence
  Description of Artificial Sequence: Synthetic peptide
  MOD_RES (6)..(6): Any L- or D-natural amino acid and any non-natural amino acid; see specification as filed for detailed description of substitutions, R-groups and preferred embodiments
  MOD_RES (9)..(9): Any L- or D-natural amino acid and any non-natural amino acid; see specification as filed for detailed description of substitutions, R-groups and preferred embodiments
  MOD_RES (11)..(11): Any L- or D-natural amino acid and any non-natural amino acid; see specification as filed for detailed description of substitutions, R-groups and preferred embodiments
  c-term may be amidated
VPLSRXVRXTXISI

SEQ ID NO: 168 - protein, 14 aa, Artificial Sequence
  Description of Artificial Sequence: Synthetic peptide
  MOD_RES (7)..(7): Any L- or D-natural amino acid and any non-natural amino acid; see specification as filed for detailed description of substitutions, R-groups and preferred embodiments
  MOD_RES (9)..(9): Any L- or D-natural amino acid and any non-natural amino acid; see specification as filed for detailed description of substitutions, R-groups and preferred embodiments
  MOD_RES (11)..(11): Any L- or D-natural amino acid and any non-natural amino acid; see specification as filed for detailed description of substitutions, R-groups and preferred embodiments
  c-term may be amidated
VPLSRTXRXTXISI

SEQ ID NO: 169 - protein, 15 aa, Artificial Sequence
  Description of Artificial Sequence: Synthetic peptide
  MOD_RES (9)..(10): Any L- or D-natural amino acid and any non-natural amino acid; see specification as filed for detailed description of substitutions, R-groups and preferred embodiments
  MOD_RES (12)..(12): Any L- or D-natural amino acid and any non-natural amino acid; see specification as filed for detailed description of substitutions, R-groups and preferred embodiments
  c-term may be amidated
VPLSRTVRXXTXISI

SEQ ID NO: 170 - protein, 17 aa, Artificial Sequence
  Description of Artificial Sequence: Synthetic peptide
  c-term may be amidated
VPLSRTVRCTCISISNQ

SEQ ID NO: 171 - protein, 17 aa, Artificial Sequence
  Description of Artificial Sequence: Synthetic peptide
  MOD_RES (3)..(3): Any L- or D-natural amino acid and any non-natural amino acid; see specification as filed for detailed description of substitutions, R-groups and preferred embodiments
  MOD_RES (9)..(9): Any L- or D-natural amino acid and any non-natural amino acid; see specification as filed for detailed description of substitutions, R-groups and preferred embodiments
  MOD_RES (11)..(11): Any L- or D-natural amino acid and any non-natural amino acid; see specification as filed for detailed description of substitutions, R-groups and preferred embodiments
  c-term may be amidated
VPXSRTVRXTXISISNQ

SEQ ID NO: 172 - protein, 17 aa, Artificial Sequence
  Description of Artificial Sequence: Synthetic peptide
  MOD_RES (4)..(4): Any L- or D-natural amino acid and any non-natural amino acid; see specification as filed for detailed description of substitutions, R-groups and preferred embodiments
  MOD_RES (9)..(9): Any L- or D-natural amino acid and any non-natural amino acid; see specification as filed for detailed description of substitutions, R-groups and preferred embodiments
  MOD_RES (11)..(11): Any L- or D-natural amino acid and any non-natural amino acid; see specification as filed for detailed description of substitutions, R-groups and preferred embodiments
  c-term may be amidated
VPLXRTVRXTXISISNQ

SEQ ID NO: 173 - protein, 17 aa, Artificial Sequence
  Description of Artificial Sequence: Synthetic peptide
  MOD_RES (5)..(5): Any L- or D-natural amino acid and any non-natural amino acid; see specification as filed for detailed description of substitutions, R-groups and preferred embodiments
  MOD_RES (9)..(9): Any L- or D-natural amino acid and any non-natural amino acid; see specification as filed for detailed description of substitutions, R-groups and preferred embodiments
  MOD_RES (11)..(11): Any L- or D-natural amino acid and any non-natural amino acid; see specification as filed for detailed description of substitutions, R-groups and preferred embodiments
  c-term may be amidated
VPLSXTVRXTXISISNQ

SEQ ID NO: 174 - protein, 17 aa, Artificial Sequence
  Description of Artificial Sequence: Synthetic peptide
  MOD_RES (6)..(6): Any L- or D-natural amino acid and any non-natural amino acid; see specification as filed for detailed description of substitutions, R-groups and preferred embodiments
  MOD_RES (9)..(9): Any L- or D-natural amino acid and any non-natural amino acid; see specification as filed for detailed description of substitutions, R-groups and preferred embodiments
  MOD_RES (11)..(11): Any L- or D-natural amino acid and any non-natural amino acid; see specification as filed for detailed description of substitutions, R-groups and preferred embodiments
  c-term may be amidated
VPLSRXVRXTXISISNQ

SEQ ID NO: 175 - protein, 17 aa, Artificial Sequence
  Description of Artificial Sequence: Synthetic peptide
  MOD_RES (7)..(7): Any L- or D-natural amino acid and any non-natural amino acid; see specification as filed for detailed description of substitutions, R-groups and preferred embodiments
  MOD_RES (9)..(9): Any L- or D-natural amino acid and any non-natural amino acid; see specification as filed for detailed description of substitutions, R-groups and preferred embodiments
  MOD_RES (11)..(11): Any L- or D-natural amino acid and any non-natural amino acid; see specification as filed for detailed description of substitutions, R-groups and preferred embodiments
  c-term may be amidated
VPLSRTXRXTXISISNQ

SEQ ID NO: 176 - protein, 18 aa, Artificial Sequence
  Description of Artificial Sequence: Synthetic peptide
  MOD_RES (9)..(10): Any L- or D-natural amino acid and any non-natural amino acid; see specification as filed for detailed description of substitutions, R-groups and preferred embodiments
  MOD_RES (12)..(12): Any L- or D-natural amino acid and any non-natural amino acid; see specification as filed for detailed description of substitutions, R-groups and preferred embodiments
  c-term may be amidated
VPLSRTVRXXTXISISNQ

SEQ ID NO: 177 - protein, 25 aa, Artificial Sequence
  Description of Artificial Sequence: Synthetic peptide
  c-term may be amidated
AISISNQPVNPRSLEKLEIIPASQF

SEQ ID NO: 178 - protein, 35 aa, Artificial Sequence
  Description of Artificial Sequence: Synthetic peptide
  c-term may be amidated
VPLSRTVRCTCISISNQPVNPRSLEKLEIIPASQF

SEQ ID NO: 179 - protein, 35 aa, Artificial Sequence
  Description of Artificial Sequence: Synthetic peptide
  MOD_RES (1)..(1): Any L- or D-natural amino acid and any non-natural amino acid; see specification as filed for detailed description of substitutions, R-groups and preferred embodiments
  MOD_RES (9)..(9): Any L- or D-natural amino acid and any non-natural amino acid; see specification as filed for detailed description of substitutions, R-groups and preferred embodiments
  MOD_RES (11)..(11): Any L- or D-natural amino acid and any non-natural amino acid; see specification as filed for detailed description of substitutions, R-groups and preferred embodiments
  c-term may be amidated
XPLSRTVRXTXISISNQPVNPRSLEKLEIIPASQF

SEQ ID NO: 180 - protein, 35 aa, Artificial Sequence
  Description of Artificial Sequence: Synthetic peptide
  MOD_RES (2)..(2): Any L- or D-natural amino acid and any non-natural amino acid; see specification as filed for detailed description of substitutions, R-groups and preferred embodiments
  MOD_RES (9)..(9): Any L- or D-natural amino acid and any non-natural amino acid; see specification as filed for detailed description of substitutions, R-groups and preferred embodiments
  MOD_RES (11)..(11): Any L- or D-natural amino acid and any non-natural amino acid; see specification as filed for detailed description of substitutions, R-groups and preferred embodiments
  c-term may be amidated
VXLSRTVRXTXISISNQPVNPRSLEKLEIIPASQF

SEQ ID NO: 181 - protein, 35 aa, Artificial Sequence
  Description of Artificial Sequence: Synthetic peptide
  MOD_RES (3)..(3): Any L- or D-natural amino acid and any non-natural amino acid; see specification as filed for detailed description of substitutions, R-groups and preferred embodiments
  MOD_RES (9)..(9): Any L- or D-natural amino acid and any non-natural amino acid; see specification as filed for detailed description of substitutions, R-groups and preferred embodiments
  MOD_RES (11)..(11): Any L- or D-natural amino acid and any non-natural amino acid; see specification as filed for detailed description of substitutions, R-groups and preferred embodiments
  c-term may be amidated
VPXSRTVRXTXISISNQPVNPRSLEKLEIIPASQF

SEQ ID NO: 182 - protein, 35 aa, Artificial Sequence
  Description of Artificial Sequence: Synthetic peptide
  MOD_RES (4)..(4): Any L- or D-natural amino acid and any non-natural amino acid; see specification as filed for detailed description of substitutions, R-groups and preferred embodiments
  MOD_RES (9)..(9): Any L- or D-natural amino acid and any non-natural amino acid; see specification as filed for detailed description of substitutions, R-groups and preferred embodiments
  MOD_RES (11)..(11): Any L- or D-natural amino acid and any non-natural amino acid; see specification as filed for detailed description of substitutions, R-groups and preferred embodiments
  c-term may be amidated
VPLXRTVRXTXISISNQPVNPRSLEKLEIIPASQF

SEQ ID NO: 183 - protein, 35 aa, Artificial Sequence
  Description of Artificial Sequence: Synthetic peptide
  MOD_RES (5)..(5): Any L- or D-natural amino acid and any non-natural amino acid; see specification as filed for detailed description of substitutions, R-groups and preferred embodiments
  MOD_RES (9)..(9): Any L- or D-natural amino acid and any non-natural amino acid; see specification as filed for detailed description of substitutions, R-groups and preferred embodiments
  MOD_RES (11)..(11): Any L- or D-natural amino acid and any non-natural amino acid; see specification as filed for detailed description of substitutions, R-groups and preferred embodiments
  c-term may be amidated
VPLSXTVRXTXISISNQPVNPRSLEKLEIIPASQF

SEQ ID NO: 184 - protein, 35 aa, Artificial Sequence
  Description of Artificial Sequence: Synthetic peptide
  MOD_RES (6)..(6): Any L- or D-natural amino acid and any non-natural amino acid; see specification as filed for detailed description of substitutions, R-groups and preferred embodiments
  MOD_RES (9)..(9): Any L- or D-natural amino acid and any non-natural amino acid; see specification as filed for detailed description of substitutions, R-groups and preferred embodiments
  MOD_RES (11)..(11): Any L- or D-natural amino acid and any non-natural amino acid; see specification as filed for detailed description of substitutions, R-groups and preferred embodiments
  c-term may be amidated
VPLSRXVRXTXISISNQPVNPRSLEKLEIIPASQF

SEQ ID NO: 185 - protein, 35 aa, Artificial Sequence
  Description of Artificial Sequence: Synthetic peptide
  MOD_RES (7)..(7): Any L- or D-natural amino acid and any non-natural amino acid; see specification as filed for detailed description of substitutions, R-groups and preferred embodiments
  MOD_RES (9)..(9): Any L- or D-natural amino acid and any non-natural amino acid; see specification as filed for detailed description of substitutions, R-groups and preferred embodiments
  MOD_RES (11)..(11): Any L- or D-natural amino acid and any non-natural amino acid; see specification as filed for detailed description of substitutions, R-groups and preferred embodiments
  c-term may be amidated
VPLSRTXRXTXISISNQPVNPRSLEKLEIIPASQF

SEQ ID NO: 186 - protein, 35 aa, Artificial Sequence
  Description of Artificial Sequence: Synthetic peptide
  MOD_RES (8)..(9): Any L- or D-natural amino acid and any non-natural amino acid; see specification as filed for detailed description of substitutions, R-groups and preferred embodiments
  MOD_RES (11)..(11): Any L- or D-natural amino acid and any non-natural amino acid; see specification as filed for detailed description of substitutions, R-groups and preferred embodiments
  c-term may be amidated
VPLSRTVXXTXISISNQPVNPRSLEKLEIIPASQF

SEQ ID NO: 187 - protein, 24 aa, Artificial Sequence
  Description of Artificial Sequence: Synthetic peptide
  c-term may be amidated
LNPESKAIKNLLKAVSKEMSKRSP

SEQ ID NO: 188 - protein, 31 aa, Artificial Sequence
  Description of Artificial Sequence: Synthetic peptide
  MOD_RES (15)..(18): Any L- or D-natural or non-natural amino acid, and this range may encompass 1 or 4 residues; see specification as filed for detailed description of substitutions, R-groups and preferred embodiments
  c-term may be amidated
VPLSRTVRCTCISIXXXXLKAVSKEMSKRSP

SEQ ID NO: 189 - protein, 31 aa, Artificial Sequence
  Description of Artificial Sequence: Synthetic peptide
  MOD_RES (1)..(1): Any L- or D-natural amino acid and any non-natural amino acid; see specification as filed for detailed description of substitutions, R-groups and preferred embodiments
  MOD_RES (9)..(9): Any L- or D-natural amino acid and any non-natural amino acid; see specification as filed for detailed description of substitutions, R-groups and preferred embodiments
  MOD_RES (11)..(11): Any L- or D-natural amino acid and any non-natural amino acid; see specification as filed for detailed description of substitutions, R-groups and preferred embodiments
  MOD_RES (15)..(18): Any L- or D-natural or non-natural amino acid, and this range may encompass 1 or 4 residues; see specification as filed for detailed description of substitutions, R-groups and preferred embodiments
  c-term may be amidated
XPLSRTVRXTXISIXXXXLKAVSKEMSKRSP

SEQ ID NO: 190 - protein, 31 aa, Artificial Sequence
  Description of Artificial Sequence: Synthetic peptide
  MOD_RES (2)..(2): Any L- or D-natural amino acid and any non-natural amino acid; see specification as filed for detailed description of substitutions, R-groups and preferred embodiments
  MOD_RES (9)..(9): Any L- or D-natural amino acid and any non-natural amino acid; see specification as filed for detailed description of substitutions, R-groups and preferred embodiments
  MOD_RES (11)..(11): Any L- or D-natural amino acid and any non-natural amino acid; see specification as filed for detailed description of substitutions, R-groups and preferred embodiments
  MOD_RES (15)..(18): Any L- or D-natural or non-natural amino acid, and this range may encompass 1 or 4 residues; see specification as filed for detailed description of substitutions, R-groups and preferred embodiments
  c-term may be amidated
VXLSRTVRXTXISIXXXXLKAVSKEMSKRSP

SEQ ID NO: 191 - protein, 31 aa, Artificial Sequence
  Description of Artificial Sequence: Synthetic peptide
  MOD_RES (3)..(3): Any L- or D-natural amino acid and any non-natural amino acid; see specification as filed for detailed description of substitutions, R-groups and preferred embodiments
  MOD_RES (9)..(9): Any L- or D-natural amino acid and any non-natural amino acid; see specification as filed for detailed description of substitutions, R-groups and preferred embodiments
  MOD_RES (11)..(11): Any L- or D-natural amino acid and any non-natural amino acid; see specification as filed for detailed description of substitutions, R-groups and preferred embodiments
  MOD_RES (15)..(18): Any L- or D-natural or non-natural amino acid, and this range may encompass 1 or 4 residues; see specification as filed for detailed description of substitutions, R-groups and preferred embodiments
  c-term may be amidated
VPXSRTVRXTXISIXXXXLKAVSKEMSKRSP

SEQ ID NO: 192 - protein, 31 aa, Artificial Sequence
  Description of Artificial Sequence: Synthetic peptide
  MOD_RES (4)..(4): Any L- or D-natural amino acid and any non-natural amino acid; see specification as filed for detailed description of substitutions, R-groups and preferred embodiments
  MOD_RES (9)..(9): Any L- or D-natural amino acid and any non-natural amino acid; see specification as filed for detailed description of substitutions, R-groups and preferred embodiments
  MOD_RES (11)..(11): Any L- or D-natural amino acid and any non-natural amino acid; see specification as filed for detailed description of substitutions, R-groups and preferred embodiments
  MOD_RES (15)..(18): Any L- or D-natural or non-natural amino acid, and this range may encompass 1 or 4 residues; see specification as filed for detailed description of substitutions, R-groups and preferred embodiments
  c-term may be amidated
VPLXRTVRXTXISIXXXXLKAVSKEMSKRSP

SEQ ID NO: 193 - protein, 31 aa, Artificial Sequence
  Description of Artificial Sequence: Synthetic peptide
  MOD_RES (5)..(5): Any L- or D-natural amino acid and any non-natural amino acid; see specification as filed for detailed description of substitutions, R-groups and preferred embodiments
  MOD_RES (9)..(9): Any L- or D-natural amino acid and any non-natural amino acid; see specification as filed for detailed description of substitutions, R-groups and preferred embodiments
  MOD_RES (11)..(11): Any L- or D-natural amino acid and any non-natural amino acid; see specification as filed for detailed description of substitutions, R-groups and preferred embodiments
  MOD_RES (15)..(18): Any L- or D-natural or non-natural amino acid, and this range may encompass 1 or 4 residues; see specification as filed for detailed description of substitutions, R-groups and preferred embodiments
  c-term may be amidated
VPLSXTVRXTXISIXXXXLKAVSKEMSKRSP

SEQ ID NO: 194 - protein, 31 aa, Artificial Sequence
  Description of Artificial Sequence: Synthetic peptide
  MOD_RES (6)..(6): Any L- or D-natural amino acid and any non-natural amino acid; see specification as filed for detailed description of substitutions, R-groups and preferred embodiments
  MOD_RES (9)..(9): Any L- or D-natural amino acid and any non-natural amino acid; see specification as filed for detailed description of substitutions, R-groups and preferred embodiments
  MOD_RES (11)..(11): Any L- or D-natural amino acid and any non-natural amino acid; see specification as filed for detailed description of substitutions, R-groups and preferred embodiments
  MOD_RES (15)..(18): Any L- or D-natural or non-natural amino acid, and this range may encompass 1 or 4 residues; see specification as filed for detailed description of substitutions, R-groups and preferred embodiments
  c-term may be amidated
VPLSRXVRXTXISIXXXXLKAVSKEMSKRSP

SEQ ID NO: 195 - protein, 31 aa, Artificial Sequence
  Description of Artificial Sequence: Synthetic peptide
  MOD_RES (7)..(7): Any L- or D-natural amino acid and any non-natural amino acid; see specification as filed for detailed description of substitutions, R-groups and preferred embodiments
  MOD_RES (9)..(9): Any L- or D-natural amino acid and any non-natural amino acid; see specification as filed for detailed description of substitutions, R-groups and preferred embodiments
  MOD_RES (11)..(11): Any L- or D-natural amino acid and any non-natural amino acid; see specification as filed for detailed description of substitutions, R-groups and preferred embodiments
  MOD_RES (15)..(18): Any L- or D-natural or non-natural amino acid, and this range may encompass 1 or 4 residues; see specification as filed for detailed description of substitutions, R-groups and preferred embodiments
  c-term may be amidated
VPLSRTXRXTXISIXXXXLKAVSKEMSKRSP

SEQ ID NO: 196 - protein, 31 aa, Artificial Sequence
  Description of Artificial Sequence: Synthetic peptide
  MOD_RES (8)..(9): Any L- or D-natural amino acid and any non-natural amino acid; see specification as filed for detailed description of substitutions, R-groups and preferred embodiments
  MOD_RES (11)..(11): Any L- or D-natural amino acid and any non-natural amino acid; see specification as filed for detailed description of substitutions, R-groups and preferred embodiments
  MOD_RES (15)..(18): Any L- or D-natural or non-natural amino acid, and this range may encompass 1 or 4 residues; see specification as filed for detailed description of substitutions, R-groups and preferred embodiments
  c-term may be amidated
VPLSRTVXXTXISIXXXXLKAVSKEMSKRSP

SEQ ID NO: 197 - protein, 31 aa, Artificial Sequence
  Description of Artificial Sequence: Synthetic peptide
  MOD_RES (12)..(12): Any L- or D-natural amino acid and any non-natural amino acid; see specification as filed for detailed description of substitutions, R-groups and preferred embodiments
  MOD_RES (15)..(18): Any L- or D-natural or non-natural amino acid, and this range may encompass 1 or 4 residues; see specification as filed for detailed description of substitutions, R-groups and preferred embodiments
  c-term may be amidated
VPLSRTVRCTCXSIXXXXLKAVSKEMSKRSP

SEQ ID NO: 198 - protein, 31 aa, Artificial Sequence
  Description of Artificial Sequence: Synthetic peptide
  MOD_RES (1)..(1): Any L- or D-natural amino acid and any non-natural amino acid; see specification as filed for detailed description of substitutions, R-groups and preferred embodiments
  MOD_RES (9)..(9): Any L- or D-natural amino acid and any non-natural amino acid; see specification as filed for detailed description of substitutions, R-groups and preferred embodiments
  MOD_RES (11)..(12): Any L- or D-natural amino acid and any non-natural amino acid; see specification as filed for detailed description of substitutions, R-groups and preferred embodiments
  MOD_RES (15)..(18): Any L- or D-natural or non-natural amino acid, and this range may encompass 1 or 4 residues; see specification as filed for detailed description of substitutions, R-groups and preferred embodiments
  c-term may be amidated
XPLSRTVRXTXXSIXXXXLKAVSKEMSKRSP

SEQ ID NO: 199 - protein, 31 aa, Artificial Sequence
  Description of Artificial Sequence: Synthetic peptide
  MOD_RES (2)..(2): Any L- or D-natural amino acid and any non-natural amino acid; see specification as filed for detailed description of substitutions, R-groups and preferred embodiments
  MOD_RES (9)..(9): Any L- or D-natural amino acid and any non-natural amino acid; see specification as filed for detailed description of substitutions, R-groups and preferred embodiments
  MOD_RES (11)..(12): Any L- or D-natural amino acid and any non-natural amino acid; see specification as filed for detailed description of substitutions, R-groups and preferred embodiments
  MOD_RES (15)..(18): Any L- or D-natural or non-natural amino acid, and this range may encompass 1 or 4 residues; see specification as filed for detailed description of substitutions, R-groups and preferred embodiments
  c-term may be amidated
VXLSRTVRXTXXSIXXXXLKAVSKEMSKRSP

SEQ ID NO: 200 - protein, 31 aa, Artificial Sequence
  Description of Artificial Sequence: Synthetic peptide
  MOD_RES (3)..(3): Any L- or D-natural amino acid and any non-natural amino acid; see specification as filed for detailed description of substitutions, R-groups and preferred embodiments
  MOD_RES (9)..(9): Any L- or D-natural amino acid and any non-natural amino acid; see specification as filed for detailed description of substitutions, R-groups and preferred embodiments
  MOD_RES (11)..(12): Any L- or D-natural amino acid and any non-natural amino acid; see specification as filed for detailed description of substitutions, R-groups and preferred embodiments
  MOD_RES (15)..(18): Any L- or D-natural or non-natural amino acid, and this range may encompass 1 or 4 residues; see specification as filed for detailed description of substitutions, R-groups and preferred embodiments
  c-term may be amidated
VPXSRTVRXTXXSIXXXXLKAVSKEMSKRSP

SEQ ID NO: 201 - protein, 31 aa, Artificial Sequence
  Description of Artificial Sequence: Synthetic peptide
  MOD_RES (4)..(4): Any L- or D-natural amino acid and any non-natural amino acid; see specification as filed for detailed description of substitutions, R-groups and preferred embodiments
  MOD_RES (9)..(9): Any L- or D-natural amino acid and any non-natural amino acid; see specification as filed for detailed description of substitutions, R-groups and preferred embodiments
  MOD_RES (11)..(12): Any L- or D-natural amino acid and any non-natural amino acid; see specification as filed for detailed description of substitutions, R-groups and preferred embodiments
  MOD_RES (15)..(18): Any L- or D-natural or non-natural amino acid, and this range may encompass 1 or 4 residues; see specification as filed for detailed description of substitutions, R-groups and preferred embodiments
  c-term may be amidated
VPLXRTVRXTXXSIXXXXLKAVSKEMSKRSP

SEQ ID NO: 202 - protein, 31 aa, Artificial Sequence
  Description of Artificial Sequence: Synthetic peptide
  MOD_RES (5)..(5): Any L- or D-natural amino acid and any non-natural amino acid; see specification as filed for detailed description of substitutions, R-groups and preferred embodiments
  MOD_RES (9)..(9): Any L- or D-natural amino acid and any non-natural amino acid; see specification as filed for detailed description of substitutions, R-groups and preferred embodiments
  MOD_RES (11)..(12): Any L- or D-natural amino acid and any non-natural amino acid; see specification as filed for detailed description of substitutions, R-groups and preferred embodiments
  MOD_RES (15)..(18): Any L- or D-natural or non-natural amino acid, and this range may encompass 1 or 4 residues; see specification as filed for detailed description of substitutions, R-groups and preferred embodiments
  c-term may be amidated
VPLSXTVRXTXXSIXXXXLKAVSKEMSKRSP

SEQ ID NO: 203 - protein, 31 aa, Artificial Sequence
  Description of Artificial Sequence: Synthetic peptide
  MOD_RES (6)..(6): Any L- or D-natural amino acid and any non-natural amino acid; see specification as filed for detailed description of substitutions, R-groups and preferred embodiments
  MOD_RES (9)..(9): Any L- or D-natural amino acid and any non-natural amino acid; see specification as filed for detailed description of substitutions, R-groups and preferred embodiments
  MOD_RES (11)..(12): Any L- or D-natural amino acid and any non-natural amino acid; see specification as filed for detailed description of substitutions, R-groups and preferred embodiments
  MOD_RES (15)..(18): Any L- or D-natural or non-natural amino acid, and this range may encompass 1 or 4 residues; see specification as filed for detailed description of substitutions, R-groups and preferred embodiments
  c-term may be amidated
VPLSRXVRXTXXSIXXXXLKAVSKEMSKRSP

SEQ ID NO: 204 - protein, 31 aa, Artificial Sequence
  Description of Artificial Sequence: Synthetic peptide
  MOD_RES (7)..(7): Any L- or D-natural amino acid and any non-natural amino acid; see specification as filed for detailed description of substitutions, R-groups and preferred embodiments
  MOD_RES (9)..(9): Any L- or D-natural amino acid and any non-natural amino acid; see specification as filed for detailed description of substitutions, R-groups and preferred embodiments
  MOD_RES (11)..(12): Any L- or D-natural amino acid and any non-natural amino acid; see specification as filed for detailed description of substitutions, R-groups and preferred embodiments
  MOD_RES (15)..(18): Any L- or D-natural or non-natural amino acid, and this range may encompass 1 or 4 residues; see specification as filed for detailed description of substitutions, R-groups and preferred embodiments
  c-term may be amidated
VPLSRTXRXTXXSIXXXXLKAVSKEMSKRSP

SEQ ID NO: 205 - protein, 31 aa, Artificial Sequence
  Description of Artificial Sequence: Synthetic peptide
  MOD_RES (8)..(9): Any L- or D-natural amino acid and any non-natural amino acid; see specification as filed for detailed description of substitutions, R-groups and preferred embodiments
  MOD_RES (11)..(12): Any L- or D-natural amino acid and any non-natural amino acid; see specification as filed for detailed description of substitutions, R-groups and preferred embodiments
  MOD_RES (15)..(18): Any L- or D-natural or non-natural amino acid, and this range may encompass 1 or 4 residues; see specification as filed for detailed description of substitutions, R-groups and preferred embodiments
  c-term may be amidated
VPLSRTVXXTXXSIXXXXLKAVSKEMSKRSP

SEQ ID NO: 206 - protein, 31 aa, Artificial Sequence
  Description of Artificial Sequence: Synthetic peptide
  MOD_RES (13)..(13): Any L- or D-natural amino acid and any non-natural amino acid; see specification as filed for detailed description of substitutions, R-groups and preferred embodiments
  MOD_RES (15)..(18): Any L- or D-natural or non-natural amino acid, and this range may encompass 1 or 4 residues; see specification as filed for detailed description of substitutions, R-groups and preferred embodiments
  c-term may be amidated
VPLSRTVRCTCIXIXXXXLKAVSKEMSKRSP

SEQ ID NO: 207 - protein, 31 aa, Artificial Sequence
  Description of Artificial Sequence: Synthetic peptide
  MOD_RES (1)..(1): Any L- or D-natural amino acid and any non-natural amino acid; see specification as filed for detailed description of substitutions, R-groups and preferred embodiments
  MOD_RES (9)..(9): Any L- or D-natural amino acid and any non-natural amino acid; see specification as filed for detailed description of substitutions, R-groups and preferred embodiments
  MOD_RES (11)..(11): Any L- or D-natural amino acid and any non-natural amino acid; see specification as filed for detailed description of substitutions, R-groups and preferred embodiments
  MOD_RES (13)..(13): Any L- or D-natural amino acid and any non-natural amino acid; see specification as filed for detailed description of substitutions, R-groups and preferred embodiments
  MOD_RES (15)..(18): Any L- or D-natural or non-natural amino acid, and this range may encompass 1 or 4 residues; see specification as filed for detailed description of substitutions, R-groups and preferred embodiments
  c-term may be amidated
XPLSRTVRXTXIXIXXXXLKAVSKEMSKRSP

SEQ ID NO: 208 - protein, 31 aa, Artificial Sequence
  Description of Artificial Sequence: Synthetic peptide
  MOD_RES (2)..(2): Any L- or D-natural amino acid and any non-natural amino acid; see specification as filed for detailed description of substitutions, R-groups and preferred embodiments
  MOD_RES (9)..(9): Any L- or D-natural amino acid and any non-natural amino acid; see specification as filed for detailed description of substitutions, R-groups and preferred embodiments
  MOD_RES (11)..(11): Any L- or D-natural amino acid and any non-natural amino acid; see specification as filed for detailed description of substitutions, R-groups and preferred embodiments
  MOD_RES (13)..(13): Any L- or D-natural amino acid and any non-natural amino acid; see specification as filed for detailed description of substitutions, R-groups and preferred embodiments
  MOD_RES (15)..(18): Any L- or D-natural or non-natural amino acid, and this range may encompass 1 or 4 residues; see specification as filed for detailed description of substitutions, R-groups and preferred embodiments
  c-term may be amidated
VXLSRTVRXTXIXIXXXXLKAVSKEMSKRSP

SEQ ID NO: 209 - protein, 31 aa, Artificial Sequence
  Description of Artificial Sequence: Synthetic peptide
  MOD_RES (3)..(3): Any L- or D-natural amino acid and any non-natural amino acid; see specification as filed for detailed description of substitutions, R-groups and preferred embodiments
  MOD_RES (9)..(9): Any L- or D-natural amino acid and any non-natural amino acid; see specification as filed for detailed description of substitutions, R-groups and preferred embodiments
  MOD_RES (11)..(11): Any L- or D-natural amino acid and any non-natural amino acid; see specification as filed for detailed description of substitutions, R-groups and preferred embodiments
  MOD_RES (13)..(13): Any L- or D-natural amino acid and any non-natural amino acid; see specification as filed for detailed description of substitutions, R-groups and preferred embodiments
  MOD_RES (15)..(18): Any L- or D-natural or non-natural amino acid, and this range may encompass 1 or 4 residues; see specification as filed for detailed description of substitutions, R-groups and preferred embodiments
  c-term may be amidated
VPXSRTVRXTXIXIXXXXLKAVSKEMSKRSP

SEQ ID NO: 210 - protein, 31 aa, Artificial Sequence
  Description of Artificial Sequence: Synthetic peptide
  MOD_RES (4)..(4): Any L- or D-natural amino acid and any non-natural amino acid; see specification as filed for detailed description of substitutions, R-groups and preferred embodiments
  MOD_RES (9)..(9): Any L- or D-natural amino acid and any non-natural amino acid; see specification as filed for detailed description of substitutions, R-groups and preferred embodiments
  MOD_RES (11)..(11): Any L- or D-natural amino acid and any non-natural amino acid; see specification as filed for detailed description of substitutions, R-groups and preferred embodiments
  MOD_RES (13)..(13): Any L- or D-natural amino acid and any non-natural amino acid; see specification as filed for detailed description of substitutions, R-groups and preferred embodiments
  MOD_RES (15)..(18): Any L- or D-natural or non-natural amino acid, and this range may encompass 1 or 4 residues; see specification as filed for detailed description of substitutions, R-groups and preferred embodiments
  c-term may be amidated
VPLXRTVRXTXIXIXXXXLKAVSKEMSKRSP

SEQ ID NO: 211 - protein, 31 aa, Artificial Sequence
  Description of Artificial Sequence: Synthetic peptide
  MOD_RES (5)..(5): Any L- or D-natural amino acid and any non-natural amino acid; see specification as filed for detailed description of substitutions, R-groups and preferred embodiments
  MOD_RES (9)..(9): Any L- or D-natural amino acid and any non-natural amino acid; see specification as filed for detailed description of substitutions, R-groups and preferred embodiments
  MOD_RES (11)..(11): Any L- or D-natural amino acid and any non-natural amino acid; see specification as filed for detailed description of substitutions, R-groups and preferred embodiments
  MOD_RES (13)..(13): Any L- or D-natural amino acid and any non-natural amino acid; see specification as filed for detailed description of substitutions, R-groups and preferred embodiments
  MOD_RES (15)..(18): Any L- or D-natural or non-natural amino acid, and this range may encompass 1 or 4 residues; see specification as filed for detailed description of substitutions, R-groups and preferred embodiments
  c-term may be amidated
VPLSXTVRXTXIXIXXXXLKAVSKEMSKRSP

SEQ ID NO: 212 - protein, 31 aa, Artificial Sequence
  Description of Artificial Sequence: Synthetic peptide
  MOD_RES (6)..(6): Any L- or D-natural amino acid and any non-natural amino acid; see specification as filed for detailed description of substitutions, R-groups and preferred embodiments
  MOD_RES (9)..(9): Any L- or D-natural amino acid and any non-natural amino acid; see specification as filed for detailed description of substitutions, R-groups and preferred embodiments
  MOD_RES (11)..(11): Any L- or D-natural amino acid and any non-natural amino acid; see specification as filed for detailed description of substitutions, R-groups and preferred embodiments
  MOD_RES (13)..(13): Any L- or D-natural amino acid and any non-natural amino acid; see specification as filed for detailed description of substitutions, R-groups and preferred embodiments
  MOD_RES (15)..(18): Any L- or D-natural or non-natural amino acid, and this range may encompass 1 or 4 residues; see specification as filed for detailed description of substitutions, R-groups and preferred embodiments
  c-term may be amidated
VPLSRXVRXTXIXIXXXXLKAVSKEMSKRSP

SEQ ID NO: 213 - protein, 31 aa, Artificial Sequence
  Description of Artificial Sequence: Synthetic peptide
  MOD_RES (7)..(7): Any L- or D-natural amino acid and any non-natural amino acid; see specification as filed for detailed description of substitutions, R-groups and preferred embodiments
  MOD_RES (9)..(9): Any L- or D-natural amino acid and any non-natural amino acid; see specification as filed for detailed description of substitutions, R-groups and preferred embodiments
  MOD_RES (11)..(11): Any L- or D-natural amino acid and any non-natural amino acid; see specification as filed for detailed description of substitutions, R-groups and preferred embodiments
  MOD_RES (13)..(13): Any L- or D-natural amino acid and any non-natural amino acid; see specification as filed for detailed description of substitutions, R-groups and preferred embodiments
  MOD_RES (15)..(18): Any L- or D-natural or non-natural amino acid, and this range may encompass 1 or 4 residues; see specification as filed for detailed description of substitutions, R-groups and preferred embodiments
  c-term may be amidated
VPLSRTXRXTXIXIXXXXLKAVSKEMSKRSP

SEQ ID NO: 214 - protein, 31 aa, Artificial Sequence
  Description of Artificial Sequence: Synthetic peptide
  MOD_RES (8)..(9): Any L- or D-natural amino acid and any non-natural amino acid; see specification as filed for detailed description of substitutions, R-groups and preferred embodiments
  MOD_RES (11)..(11): Any L- or D-natural amino acid and any non-natural amino acid; see specification as filed for detailed description of substitutions, R-groups and preferred embodiments
  MOD_RES (13)..(13): Any L- or D-natural amino acid and any non-natural amino acid; see specification as filed for detailed description of substitutions, R-groups and preferred embodiments
  MOD_RES (15)..(18): Any L- or D-natural or non-natural amino acid, and this range may encompass 1 or 4 residues; see specification as filed for detailed description of substitutions, R-groups and preferred embodiments
  c-term may be amidated
VPLSRTVXXTXIXIXXXXLKAVSKEMSKRSP

SEQ ID NO: 215 - protein, 31 aa, Artificial Sequence
  Description of Artificial Sequence: Synthetic peptide
  MOD_RES (14)..(14): Any L- or D-natural amino acid and any non-natural amino acid; see specification as filed for detailed description of substitutions, R-groups and preferred embodiments
  MOD_RES (15)..(18): Any L- or D-natural or non-natural amino acid, and this range may encompass 1 or 4 residues; see specification as filed for detailed description of substitutions, R-groups and preferred embodiments
  c-term may be amidated
VPLSRTVRCTCISXXXXXLKAVSKEMSKRSP

SEQ ID NO: 216 - protein, 31 aa, Artificial Sequence
  Description of Artificial Sequence: Synthetic peptide
  MOD_RES (1)..(1): Any L- or D-natural amino acid and any non-natural amino acid; see specification as filed for detailed description of substitutions, R-groups and preferred embodiments
  MOD_RES (9)..(9): Any L- or D-natural amino acid and any non-natural amino acid; see specification as filed for detailed description of substitutions, R-groups and preferred embodiments
  MOD_RES (11)..(11): Any L- or D-natural amino acid and any non-natural amino acid; see specification as filed for detailed description of substitutions, R-groups and preferred embodiments
  MOD_RES (14)..(14): Any L- or D-natural amino acid and any non-natural amino acid; see specification as filed for detailed description of substitutions, R-groups and preferred embodiments
  MOD_RES (15)..(18): Any L- or D-natural or non-natural amino acid, and this range may encompass 1 or 4 residues; see specification as filed for detailed description of substitutions, R-groups and preferred embodiments
  c-term may be amidated
XPLSRTVRXTXISXXXXXLKAVSKEMSKRSP

SEQ ID NO: 217 - protein, 31 aa, Artificial Sequence
  Description of Artificial Sequence: Synthetic peptide
  MOD_RES (2)..(2): Any L- or D-natural amino acid and any non-natural amino acid; see specification as filed for detailed description of substitutions, R-groups and preferred embodiments
  MOD_RES (9)..(9): Any L- or D-natural amino acid and any non-natural amino acid; see specification as filed for detailed description of substitutions, R-groups and preferred embodiments
  MOD_RES (11)..(11): Any L- or D-natural amino acid and any non-natural amino acid; see specification as filed for detailed description of substitutions, R-groups and preferred embodiments
  MOD_RES (14)..(14): Any L- or D-natural amino acid and any non-natural amino acid; see specification as filed for detailed description of substitutions, R-groups and preferred embodiments
  MOD_RES (15)..(18): Any L- or D-natural or non-natural amino acid, and this range may encompass 1 or 4 residues; see specification as filed for detailed description of substitutions, R-groups and preferred embodiments
  c-term may be amidated
VXLSRTVRXTXISXXXXXLKAVSKEMSKRSP

SEQ ID NO: 218 - protein, 31 aa, Artificial Sequence
  Description of Artificial Sequence: Synthetic peptide
  MOD_RES (3)..(3): Any L- or D-natural amino acid and any non-natural amino acid; see specification as filed for detailed description of substitutions, R-groups and preferred embodiments
  MOD_RES (9)..(9): Any L- or D-natural amino acid and any non-natural amino acid; see specification as filed for detailed description of substitutions, R-groups and preferred embodiments
  MOD_RES (11)..(11): Any L- or D-natural amino acid and any non-natural amino acid; see specification as filed for detailed description of substitutions, R-groups and preferred embodiments
  MOD_RES (14)..(14): Any L- or D-natural amino acid and any non-natural amino acid; see specification as filed for detailed description of substitutions, R-groups and preferred embodiments
  MOD_RES (15)..(18): Any L- or D-natural or non-natural amino acid, and this range may encompass 1 or 4 residues; see specification as filed for detailed description of substitutions, R-groups and preferred embodiments
  c-term may be amidated
VPXSRTVRXTXISXXXXXLKAVSKEMSKRSP

SEQ ID NO: 219 - protein, 31 aa, Artificial Sequence
  Description of Artificial Sequence: Synthetic peptide
  MOD_RES (4)..(4): Any L- or D-natural amino acid and any non-natural amino acid; see specification as filed for detailed description of substitutions, R-groups and preferred embodiments
  MOD_RES (9)..(9): Any L- or D-natural amino acid and any non-natural amino acid; see specification as filed for detailed description of substitutions, R-groups and preferred embodiments
  MOD_RES (11)..(11): Any L- or D-natural amino acid and any non-natural amino acid; see specification as filed for detailed description of substitutions, R-groups and preferred embodiments
  MOD_RES (14)..(14): Any L- or D-natural amino acid and any non-natural amino acid; see specification as filed for detailed description of substitutions, R-groups and preferred embodiments
  MOD_RES (15)..(18): Any L- or D-natural or non-natural amino acid, and this range may encompass 1 or 4 residues; see specification as filed for detailed description of substitutions, R-groups and preferred embodiments
  c-term may be amidated
VPLXRTVRXTXISXXXXXLKAVSKEMSKRSP

SEQ ID NO: 220 - protein, 31 aa, Artificial Sequence
  Description of Artificial Sequence: Synthetic peptide
  MOD_RES (5)..(5): Any L- or D-natural amino acid and any non-natural amino acid; see specification as filed for detailed description of substitutions, R-groups and preferred embodiments
  MOD_RES (9)..(9): Any L- or D-natural amino acid and any non-natural amino acid; see specification as filed for detailed description of substitutions, R-groups and preferred embodiments
  MOD_RES (11)..(11): Any L- or D-natural amino acid and any non-natural amino acid; see specification as filed for detailed description of substitutions, R-groups and preferred embodiments
  MOD_RES (14)..(14): Any L- or D-natural amino acid and any non-natural amino acid; see specification as filed for detailed description of substitutions, R-groups and preferred embodiments
  MOD_RES (15)..(18): Any L- or D-natural or non-natural amino acid, and this range may encompass 1 or 4 residues; see specification as filed for detailed description of substitutions, R-groups and preferred embodiments
  c-term may be amidated
VPLSXTVRXTXISXXXXXLKAVSKEMSKRSP

SEQ ID NO: 221 - protein, 31 aa, Artificial Sequence
  Description of Artificial Sequence: Synthetic peptide
  MOD_RES (6)..(6): Any L- or D-natural amino acid and any non-natural amino acid; see specification as filed for detailed description of substitutions, R-groups and preferred embodiments
  MOD_RES (9)..(9): Any L- or D-natural amino acid and any non-natural amino acid; see specification as filed for detailed description of substitutions, R-groups and preferred embodiments
  MOD_RES (11)..(11): Any L- or D-natural amino acid and any non-natural amino acid; see specification as filed for detailed description of substitutions, R-groups and preferred embodiments
  MOD_RES (14)..(14): Any L- or D-natural amino acid and any non-natural amino acid; see specification as filed for detailed description of substitutions, R-groups and preferred embodiments
  MOD_RES (15)..(18): Any L- or D-natural or non-natural amino acid, and this range may encompass 1 or 4 residues; see specification as filed for detailed description of substitutions, R-groups and preferred embodiments
  c-term may be amidated
VPLSRXVRXTXISXXXXXLKAVSKEMSKRSP

SEQ ID NO: 222 - protein, 31 aa, Artificial Sequence
  Description of Artificial Sequence: Synthetic peptide
  MOD_RES (7)..(7): Any L- or D-natural amino acid and any non-natural amino acid; see specification as filed for detailed description of substitutions, R-groups and preferred embodiments
  MOD_RES (9)..(9): Any L- or D-natural amino acid and any non-natural amino acid; see specification as filed for detailed description of substitutions, R-groups and preferred embodiments
  MOD_RES (11)..(11): Any L- or D-natural amino acid and any non-natural amino acid; see specification as filed for detailed description of substitutions, R-groups and preferred embodiments
  MOD_RES (14)..(14): Any L- or D-natural amino acid and any non-natural amino acid; see specification as filed for detailed description of substitutions, R-groups and preferred embodiments
  MOD_RES (15)..(18): Any L- or D-natural or non-natural amino acid, and this range may encompass 1 or 4 residues; see specification as filed for detailed description of substitutions, R-groups and preferred embodiments
  c-term may be amidated
VPLSRTXRXTXISXXXXXLKAVSKEMSKRSP

SEQ ID NO: 223 - protein, 31 aa, Artificial Sequence
  Description of Artificial Sequence: Synthetic peptide
  MOD_RES (8)..(9): Any L- or D-natural amino acid and any non-natural amino acid; see specification as filed for detailed description of substitutions, R-groups and preferred embodiments
  MOD_RES (11)..(11): Any L- or D-natural amino acid and any non-natural amino acid; see specification as filed for detailed description of substitutions, R-groups and preferred embodiments
  MOD_RES (14)..(14): Any L- or D-natural amino acid and any non-natural amino acid; see specification as filed for detailed description of substitutions, R-groups and preferred embodiments
  MOD_RES (15)..(18): Any L- or D-natural or non-natural amino acid, and this range may encompass 1 or 4 residues; see specification as filed for detailed description of substitutions, R-groups and preferred embodiments
  c-term may be amidated
VPLSRTVXXTXISXXXXXLKAVSKEMSKRSP

SEQ ID NO: 224 - protein, 31 aa, Artificial Sequence
  Description of Artificial Sequence: Synthetic peptide
  MOD_RES (15)..(18): Any L- or D-natural or non-natural amino acid, and this range may encompass 1 or 4 residues; see specification as filed for detailed description of substitutions, R-groups and preferred embodiments
  c-term may be amidated
VPLSRTVRCTCISIXXXXLNPESKAIKNLLK

SEQ ID NO: 225 - protein, 31 aa, Artificial Sequence
  Description of Artificial Sequence: Synthetic peptide
  MOD_RES (1)..(1): Any L- or D-natural amino acid and any non-natural amino acid; see specification as filed for detailed description of substitutions, R-groups and preferred embodiments
  MOD_RES (9)..(9): Any L- or D-natural amino acid and any non-natural amino acid; see specification as filed for detailed description of substitutions, R-groups and preferred embodiments
  MOD_RES (11)..(11): Any L- or D-natural amino acid and any non-natural amino acid; see specification as filed for detailed description of substitutions, R-groups and preferred embodiments
  MOD_RES (15)..(18): Any L- or D-natural or non-natural amino acid, and this range may encompass 1 or 4 residues; see specification as filed for detailed description of substitutions, R-groups and preferred embodiments
  c-term may be amidated
XPLSRTVRXTXISIXXXXLNPESKAIKNLLK

SEQ ID NO: 226 - protein, 31 aa, Artificial Sequence
  Description of Artificial Sequence: Synthetic peptide
  MOD_RES (2)..(2): Any L- or D-natural amino acid and any non-natural amino acid; see specification as filed for detailed description of substitutions, R-groups and preferred embodiments
  MOD_RES (9)..(9): Any L- or D-natural amino acid and any non-natural amino acid; see specification as filed for detailed description of substitutions, R-groups and preferred embodiments
  MOD_RES (11)..(11): Any L- or D-natural amino acid and any non-natural amino acid; see specification as filed for detailed description of substitutions, R-groups and preferred embodiments
  MOD_RES (15)..(18): Any L- or D-natural or non-natural amino acid, and this range may encompass 1 or 4 residues; see specification as filed for detailed description of substitutions, R-groups and preferred embodiments
  c-term may be amidated
VXLSRTVRXTXISIXXXXLNPESKAIKNLLK

SEQ ID NO: 227 - protein, 31 aa, Artificial Sequence
  Description of Artificial Sequence: Synthetic peptide
  MOD_RES (3)..(3): Any L- or D-natural amino acid and any non-natural amino acid; see specification as filed for detailed description of substitutions, R-groups and preferred embodiments
  MOD_RES (9)..(9): Any L- or D-natural amino acid and any non-natural amino acid; see specification as filed for detailed description of substitutions, R-groups and preferred embodiments
  MOD_RES (11)..(11): Any L- or D-natural amino acid and any non-natural amino acid; see specification as filed for detailed description of substitutions, R-groups and preferred embodiments
  MOD_RES (15)..(18): Any L- or D-natural or non-natural amino acid, and this range may encompass 1 or 4 residues; see specification as filed for detailed description of substitutions, R-groups and preferred embodiments
  c-term may be amidated
VPXSRTVRXTXISIXXXXLNPESKAIKNLLK

SEQ ID NO: 228 - protein, 31 aa, Artificial Sequence
  Description of Artificial Sequence: Synthetic peptide
  MOD_RES (4)..(4): Any L- or D-natural amino acid and any non-natural amino acid; see specification as filed for detailed description of substitutions, R-groups and preferred embodiments
  MOD_RES (9)..(9): Any L- or D-natural amino acid and any non-natural amino acid; see specification as filed for detailed description of substitutions, R-groups and preferred embodiments
  MOD_RES (11)..(11): Any L- or D-natural amino acid and any non-natural amino acid; see specification as filed for detailed description of substitutions, R-groups and preferred embodiments
  MOD_RES (15)..(18): Any L- or D-natural or non-natural amino acid, and this range may encompass 1 or 4 residues; see specification as filed for detailed description of substitutions, R-groups and preferred embodiments
  c-term may be amidated
VPLXRTVRXTXISIXXXXLNPESKAIKNLLK

SEQ ID NO: 229 - protein, 31 aa, Artificial Sequence
  Description of Artificial Sequence: Synthetic peptide
  MOD_RES (5)..(5): Any L- or D-natural amino acid and any non-natural amino acid; see specification as filed for detailed description of substitutions, R-groups and preferred embodiments
  MOD_RES (9)..(9): Any L- or D-natural amino acid and any non-natural amino acid; see specification as filed for detailed description of substitutions, R-groups and preferred embodiments
  MOD_RES (11)..(11): Any L- or D-natural amino acid and any non-natural amino acid; see specification as filed for detailed description of substitutions, R-groups and preferred embodiments
  MOD_RES (15)..(18): Any L- or D-natural or non-natural amino acid, and this range may encompass 1 or 4 residues; see specification as filed for detailed description of substitutions, R-groups and preferred embodiments
  c-term may be amidated
VPLSXTVRXTXISIXXXXLNPESKAIKNLLK

SEQ ID NO: 230 - protein, 31 aa, Artificial Sequence
  Description of Artificial Sequence: Synthetic peptide
  MOD_RES (6)..(6): Any L- or D-natural amino acid and any non-natural amino acid; see specification as filed for detailed description of substitutions, R-groups and preferred embodiments
  MOD_RES (9)..(9): Any L- or D-natural amino acid and any non-natural amino acid; see specification as filed for detailed description of substitutions, R-groups and preferred embodiments
  MOD_RES (11)..(11): Any L- or D-natural amino acid and any non-natural amino acid; see specification as filed for detailed description of substitutions, R-groups and preferred embodiments
  MOD_RES (15)..(18): Any L- or D-natural or non-natural amino acid, and this range may encompass 1 or 4 residues; see specification as filed for detailed description of substitutions, R-groups and preferred embodiments
  c-term may be amidated
VPLSRXVRXTXISIXXXXLNPESKAIKNLLK

SEQ ID NO: 231 - protein, 31 aa, Artificial Sequence
  Description of Artificial Sequence: Synthetic peptide
  MOD_RES (7)..(7): Any L- or D-natural amino acid and any non-natural amino acid; see specification as filed for detailed description of substitutions, R-groups and preferred embodiments
  MOD_RES (9)..(9): Any L- or D-natural amino acid and any non-natural amino acid; see specification as filed for detailed description of substitutions, R-groups and preferred embodiments
  MOD_RES (11)..(11): Any L- or D-natural amino acid and any non-natural amino acid; see specification as filed for detailed description of substitutions, R-groups and preferred embodiments
  MOD_RES (15)..(18): Any L- or D-natural or non-natural amino acid, and this range may encompass 1 or 4 residues; see specification as filed for detailed description of substitutions, R-groups and preferred embodiments
  c-term may be amidated
VPLSRTXRXTXISIXXXXLNPESKAIKNLLK

SEQ ID NO: 232 - protein, 31 aa, Artificial Sequence
  Description of Artificial Sequence: Synthetic peptide
  MOD_RES (8)..(9): Any L- or D-natural amino acid and any non-natural amino acid; see specification as filed for detailed description of substitutions, R-groups and preferred embodiments
  MOD_RES (11)..(11): Any L- or D-natural amino acid and any non-natural amino acid; see specification as filed for detailed description of substitutions, R-groups and preferred embodiments
  MOD_RES (15)..(18): Any L- or D-natural or non-natural amino acid, and this range may encompass 1 or 4 residues; see specification as filed for detailed description of substitutions, R-groups and preferred embodiments
  c-term may be amidated
VPLSRTVXXTXISIXXXXLNPESKAIKNLLK

SEQ ID NO: 233 - protein, 31 aa, Artificial Sequence
  Description of Artificial Sequence: Synthetic peptide
  MOD_RES (12)..(12): Any L- or D-natural amino acid and any non-natural amino acid; see specification as filed for detailed description of substitutions, R-groups and preferred embodiments
  MOD_RES (15)..(18): Any L- or D-natural or non-natural amino acid, and this range may encompass 1 or 4 residues; see specification as filed for detailed description of substitutions, R-groups and preferred embodiments
  c-term may be amidated
VPLSRTVRCTCXSIXXXXLNPESKAIKNLLK

SEQ ID NO: 234 - protein, 31 aa, Artificial Sequence
  Description of Artificial Sequence: Synthetic peptide
  MOD_RES (1)..(1): Any L- or D-natural amino acid and any non-natural amino acid; see specification as filed for detailed description of substitutions, R-groups and preferred embodiments
  MOD_RES (9)..(9): Any L- or D-natural amino acid and any non-natural amino acid; see specification as filed for detailed description of substitutions, R-groups and preferred embodiments
  MOD_RES (11)..(12): Any L- or D-natural amino acid and any non-natural amino acid; see specification as filed for detailed description of substitutions, R-groups and preferred embodiments
  MOD_RES (15)..(18): Any L- or D-natural or non-natural amino acid, and this range may encompass 1 or 4 residues; see specification as filed for detailed description of substitutions, R-groups and preferred embodiments
  c-term may be amidated
XPLSRTVRXTXXSIXXXXLNPESKAIKNLLK

SEQ ID NO: 235 - protein, 31 aa, Artificial Sequence
  Description of Artificial Sequence: Synthetic peptide
  MOD_RES (2)..(2): Any L- or D-natural amino acid and any non-natural amino acid; see specification as filed for detailed description of substitutions, R-groups and preferred embodiments
  MOD_RES (9)..(9): Any L- or D-natural amino acid and any non-natural amino acid; see specification as filed for detailed description of substitutions, R-groups and preferred embodiments
  MOD_RES (11)..(12): Any L- or D-natural amino acid and any non-natural amino acid; see specification as filed for detailed description of substitutions, R-groups and preferred embodiments
  MOD_RES (15)..(18): Any L- or D-natural or non-natural amino acid, and this range may encompass 1 or 4 residues; see specification as filed for detailed description of substitutions, R-groups and preferred embodiments
  c-term may be amidated
VXLSRTVRXTXXSIXXXXLNPESKAIKNLLK

SEQ ID NO: 236 - protein, 31 aa, Artificial Sequence
  Description of Artificial Sequence: Synthetic peptide
  MOD_RES (3)..(3): Any L- or D-natural amino acid and any non-natural amino acid; see specification as filed for detailed description of substitutions, R-groups and preferred embodiments
  MOD_RES (9)..(9): Any L- or D-natural amino acid and any non-natural amino acid; see specification as filed for detailed description of substitutions, R-groups and preferred embodiments
  MOD_RES (11)..(12): Any L- or D-natural amino acid and any non-natural amino acid; see specification as filed for detailed description of substitutions, R-groups and preferred embodiments
  MOD_RES (15)..(18): Any L- or D-natural or non-natural amino acid, and this range may encompass 1 or 4 residues; see specification as filed for detailed description of substitutions, R-groups and preferred embodiments
  c-term may be amidated
VPXSRTVRXTXXSIXXXXLNPESKAIKNLLK

SEQ ID NO: 237 - protein, 31 aa, Artificial Sequence
  Description of Artificial Sequence: Synthetic peptide
  MOD_RES (4)..(4): Any L- or D-natural amino acid and any non-natural amino acid; see specification as filed for detailed description of substitutions, R-groups and preferred embodiments
  MOD_RES (9)..(9): Any L- or D-natural amino acid and any non-natural amino acid; see specification as filed for detailed description of substitutions, R-groups and preferred embodiments
  MOD_RES (11)..(12): Any L- or D-natural amino acid and any non-natural amino acid; see specification as filed for detailed description of substitutions, R-groups and preferred embodiments
  MOD_RES (15)..(18): Any L- or D-natural or non-natural amino acid, and this range may encompass 1 or 4 residues; see specification as filed for detailed description of substitutions, R-groups and preferred embodiments
  c-term may be amidated
VPLXRTVRXTXXSIXXXXLNPESKAIKNLLK

SEQ ID NO: 238 - protein, 31 aa, Artificial Sequence
  Description of Artificial Sequence: Synthetic peptide
  MOD_RES (5)..(5): Any L- or D-natural amino acid and any non-natural amino acid; see specification as filed for detailed description of substitutions, R-groups and preferred embodiments
  MOD_RES (9)..(9): Any L- or D-natural amino acid and any non-natural amino acid; see specification as filed for detailed description of substitutions, R-groups and preferred embodiments
  MOD_RES (11)..(12): Any L- or D-natural amino acid and any non-natural amino acid; see specification as filed for detailed description of substitutions, R-groups and preferred embodiments
  MOD_RES (15)..(18): Any L- or D-natural or non-natural amino acid, and this range may encompass 1 or 4 residues; see specification as filed for detailed description of substitutions, R-groups and preferred embodiments
  c-term may be amidated
VPLSXTVRXTXXSIXXXXLNPESKAIKNLLK

SEQ ID NO: 239 - protein, 31 aa, Artificial Sequence
  Description of Artificial Sequence: Synthetic peptide
  MOD_RES (6)..(6): Any L- or D-natural amino acid and any non-natural amino acid; see specification as filed for detailed description of substitutions, R-groups and preferred embodiments
  MOD_RES (9)..(9): Any L- or D-natural amino acid and any non-natural amino acid; see specification as filed for detailed description of substitutions, R-groups and preferred embodiments
  MOD_RES (11)..(12): Any L- or D-natural amino acid and any non-natural amino acid; see specification as filed for detailed description of substitutions, R-groups and preferred embodiments
  MOD_RES (15)..(18): Any L- or D-natural or non-natural amino acid, and this range may encompass 1 or 4 residues; see specification as filed for detailed description of substitutions, R-groups and preferred embodiments
  c-term may be amidated
VPLSRXVRXTXXSIXXXXLNPESKAIKNLLK

SEQ ID NO: 240 - protein, 31 aa, Artificial Sequence
  Description of Artificial Sequence: Synthetic peptide
  MOD_RES (7)..(7): Any L- or D-natural amino acid and any non-natural amino acid; see specification as filed for detailed description of substitutions, R-groups and preferred embodiments
  MOD_RES (9)..(9): Any L- or D-natural amino acid and any non-natural amino acid; see specification as filed for detailed description of substitutions, R-groups and preferred embodiments
  MOD_RES (11)..(12): Any L- or D-natural amino acid and any non-natural amino acid; see specification as filed for detailed description of substitutions, R-groups and preferred embodiments
  MOD_RES (15)..(18): Any L- or D-natural or non-natural amino acid, and this range may encompass 1 or 4 residues; see specification as filed for detailed description of substitutions, R-groups and preferred embodiments
  c-term may be amidated
VPLSRTXRXTXXSIXXXXLNPESKAIKNLLK

SEQ ID NO: 241 - protein, 31 aa, Artificial Sequence
  Description of Artificial Sequence: Synthetic peptide
  MOD_RES (8)..(9): Any L- or D-natural amino acid and any non-natural amino acid; see specification as filed for detailed description of substitutions, R-groups and preferred embodiments
  MOD_RES (11)..(12): Any L- or D-natural amino acid and any non-natural amino acid; see specification as filed for detailed description of substitutions, R-groups and preferred embodiments
  MOD_RES (15)..(18): Any L- or D-natural or non-natural amino acid, and this range may encompass 1 or 4 residues; see specification as filed for detailed description of substitutions, R-groups and preferred embodiments
  c-term may be amidated
VPLSRTVXXTXXSIXXXXLNPESKAIKNLLK

SEQ ID NO: 242 - protein, 31 aa, Artificial Sequence
  Description of Artificial Sequence: Synthetic peptide
  MOD_RES (13)..(13): Any L- or D-natural amino acid and any non-natural amino acid; see specification as filed for detailed description of substitutions, R-groups and preferred embodiments
  MOD_RES (15)..(18): Any L- or D-natural or non-natural amino acid, and this range may encompass 1 or 4 residues; see specification as filed for detailed description of substitutions, R-groups and preferred embodiments
  c-term may be amidated
VPLSRTVRCTCIXIXXXXLNPESKAIKNLLK

SEQ ID NO: 243 - protein, 31 aa, Artificial Sequence
  Description of Artificial Sequence: Synthetic peptide
  MOD_RES (1)..(1): Any L- or D-natural amino acid and any non-natural amino acid; see specification as filed for detailed description of substitutions, R-groups and preferred embodiments
  MOD_RES (9)..(9): Any L- or D-natural amino acid and any non-natural amino acid; see specification as filed for detailed description of substitutions, R-groups and preferred embodiments
  MOD_RES (11)..(11): Any L- or D-natural amino acid and any non-natural amino acid; see specification as filed for detailed description of substitutions, R-groups and preferred embodiments
  MOD_RES (13)..(13): Any L- or D-natural amino acid and any non-natural amino acid; see specification as filed for detailed description of substitutions, R-groups and preferred embodiments
  MOD_RES (15)..(18): Any L- or D-natural or non-natural amino acid, and this range may encompass 1 or 4 residues; see specification as filed for detailed description of substitutions, R-groups and preferred embodiments
  c-term may be amidated
XPLSRTVRXTXIXIXXXXLNPESKAIKNLLK

SEQ ID NO: 244 - protein, 31 aa, Artificial Sequence
  Description of Artificial Sequence: Synthetic peptide
  MOD_RES (2)..(2): Any L- or D-natural amino acid and any non-natural amino acid; see specification as filed for detailed description of substitutions, R-groups and preferred embodiments
  MOD_RES (9)..(9): Any L- or D-natural amino acid and any non-natural amino acid; see specification as filed for detailed description of substitutions, R-groups and preferred embodiments
  MOD_RES (11)..(11): Any L- or D-natural amino acid and any non-natural amino acid; see specification as filed for detailed description of substitutions, R-groups and preferred embodiments
  MOD_RES (13)..(13): Any L- or D-natural amino acid and any non-natural amino acid; see specification as filed for detailed description of substitutions, R-groups and preferred embodiments
  MOD_RES (15)..(18): Any L- or D-natural or non-natural amino acid, and this range may encompass 1 or 4 residues; see specification as filed for detailed description of substitutions, R-groups and preferred embodiments
  c-term may be amidated
VXLSRTVRXTXIXIXXXXLNPESKAIKNLLK

SEQ ID NO: 245 - protein, 31 aa, Artificial Sequence
  Description of Artificial Sequence: Synthetic peptide
  MOD_RES (3)..(3): Any L- or D-natural amino acid and any non-natural amino acid; see specification as filed for detailed description of substitutions, R-groups and preferred embodiments
  MOD_RES (9)..(9): Any L- or D-natural amino acid and any non-natural amino acid; see specification as filed for detailed description of substitutions, R-groups and preferred embodiments
  MOD_RES (11)..(11): Any L- or D-natural amino acid and any non-natural amino acid; see specification as filed for detailed description of substitutions, R-groups and preferred embodiments
  MOD_RES (13)..(13): Any L- or D-natural amino acid and any non-natural amino acid; see specification as filed for detailed description of substitutions, R-groups and preferred embodiments
  MOD_RES (15)..(18): Any L- or D-natural or non-natural amino acid, and this range may encompass 1 or 4 residues; see specification as filed for detailed description of substitutions, R-groups and preferred embodiments
  c-term may be amidated
VPXSRTVRXTXIXIXXXXLNPESKAIKNLLK

SEQ ID NO: 246 - protein, 31 aa, Artificial Sequence
  Description of Artificial Sequence: Synthetic peptide
  MOD_RES (4)..(4): Any L- or D-natural amino acid and any non-natural amino acid; see specification as filed for detailed description of substitutions, R-groups and preferred embodiments
  MOD_RES (9)..(9): Any L- or D-natural amino acid and any non-natural amino acid; see specification as filed for detailed description of substitutions, R-groups and preferred embodiments
  MOD_RES (11)..(11): Any L- or D-natural amino acid and any non-natural amino acid; see specification as filed for detailed description of substitutions, R-groups and preferred embodiments
  MOD_RES (13)..(13): Any L- or D-natural amino acid and any non-natural amino acid; see specification as filed for detailed description of substitutions, R-groups and preferred embodiments
  MOD_RES (15)..(18): Any L- or D-natural or non-natural amino acid, and this range may encompass 1 or 4 residues; see specification as filed for detailed description of substitutions, R-groups and preferred embodiments
  c-term may be amidated
VPLXRTVRXTXIXIXXXXLNPESKAIKNLLK

SEQ ID NO: 247 - protein, 31 aa, Artificial Sequence
  Description of Artificial Sequence: Synthetic peptide
  MOD_RES (5)..(5): Any L- or D-natural amino acid and any non-natural amino acid; see specification as filed for detailed description of substitutions, R-groups and preferred embodiments
  MOD_RES (9)..(9): Any L- or D-natural amino acid and any non-natural amino acid; see specification as filed for detailed description of substitutions, R-groups and preferred embodiments
  MOD_RES (11)..(11): Any L- or D-natural amino acid and any non-natural amino acid; see specification as filed for detailed description of substitutions, R-groups and preferred embodiments
  MOD_RES (13)..(13): Any L- or D-natural amino acid and any non-natural amino acid; see specification as filed for detailed description of substitutions, R-groups and preferred embodiments
  MOD_RES (15)..(18): Any L- or D-natural or non-natural amino acid, and this range may encompass 1 or 4 residues; see specification as filed for detailed description of substitutions, R-groups and preferred embodiments
  c-term may be amidated
VPLSXTVRXTXIXIXXXXLNPESKAIKNLLK

SEQ ID NO: 248 - protein, 31 aa, Artificial Sequence
  Description of Artificial Sequence: Synthetic peptide
  MOD_RES (6)..(6): Any L- or D-natural amino acid and any non-natural amino acid; see specification as filed for detailed description of substitutions, R-groups and preferred embodiments
  MOD_RES (9)..(9): Any L- or D-natural amino acid and any non-natural amino acid; see specification as filed for detailed description of substitutions, R-groups and preferred embodiments
  MOD_RES (11)..(11): Any L- or D-natural amino acid and any non-natural amino acid; see specification as filed for detailed description of substitutions, R-groups and preferred embodiments
  MOD_RES (13)..(13): Any L- or D-natural amino acid and any non-natural amino acid; see specification as filed for detailed description of substitutions, R-groups and preferred embodiments
  MOD_RES (15)..(18): Any L- or D-natural or non-natural amino acid, and this range may encompass 1 or 4 residues; see specification as filed for detailed description of substitutions, R-groups and preferred embodiments
  c-term may be amidated
VPLSRXVRXTXIXIXXXXLNPESKAIKNLLK

SEQ ID NO: 249 - protein, 31 aa, Artificial Sequence
  Description of Artificial Sequence: Synthetic peptide
  MOD_RES (7)..(7): Any L- or D-natural amino acid and any non-natural amino acid; see specification as filed for detailed description of substitutions, R-groups and preferred embodiments
  MOD_RES (9)..(9): Any L- or D-natural amino acid and any non-natural amino acid; see specification as filed for detailed description of substitutions, R-groups and preferred embodiments
  MOD_RES (11)..(11): Any L- or D-natural amino acid and any non-natural amino acid; see specification as filed for detailed description of substitutions, R-groups and preferred embodiments
  MOD_RES (13)..(13): Any L- or D-natural amino acid and any non-natural amino acid; see specification as filed for detailed description of substitutions, R-groups and preferred embodiments
  MOD_RES (15)..(18): Any L- or D-natural or non-natural amino acid, and this range may encompass 1 or 4 residues; see specification as filed for detailed description of substitutions, R-groups and preferred embodiments
  c-term may be amidated
VPLSRTXRXTXIXIXXXXLNPESKAIKNLLK

SEQ ID NO: 250 - protein, 31 aa, Artificial Sequence
  Description of Artificial Sequence: Synthetic peptide
  MOD_RES (8)..(9): Any L- or D-natural amino acid and any non-natural amino acid; see specification as filed for detailed description of substitutions, R-groups and preferred embodiments
  MOD_RES (11)..(11): Any L- or D-natural amino acid and any non-natural amino acid; see specification as filed for detailed description of substitutions, R-groups and preferred embodiments
  MOD_RES (13)..(13): Any L- or D-natural amino acid and any non-natural amino acid; see specification as filed for detailed description of substitutions, R-groups and preferred embodiments
  MOD_RES (15)..(18): Any L- or D-natural or non-natural amino acid, and this range may encompass 1 or 4 residues; see specification as filed for detailed description of substitutions, R-groups and preferred embodiments
  c-term may be amidated
VPLSRTVXXTXIXIXXXXLNPESKAIKNLLK

SEQ ID NO: 251 - protein, 31 aa, Artificial Sequence
  Description of Artificial Sequence: Synthetic peptide
  MOD_RES (14)..(14): Any L- or D-natural amino acid and any non-natural amino acid; see specification as filed for detailed description of substitutions, R-groups and preferred embodiments
  MOD_RES (15)..(18): Any L- or D-natural or non-natural amino acid, and this range may encompass 1 or 4 residues; see specification as filed for detailed description of substitutions, R-groups and preferred embodiments
  c-term may be amidated
VPLSRTVRCTCISXXXXXLNPESKAIKNLLK

SEQ ID NO: 252 - protein, 31 aa, Artificial Sequence
  Description of Artificial Sequence: Synthetic peptide
  MOD_RES (1)..(1): Any L- or D-natural amino acid and any non-natural amino acid; see specification as filed for detailed description of substitutions, R-groups and preferred embodiments
  MOD_RES (9)..(9): Any L- or D-natural amino acid and any non-natural amino acid; see specification as filed for detailed description of substitutions, R-groups and preferred embodiments
  MOD_RES (11)..(11): Any L- or D-natural amino acid and any non-natural amino acid; see specification as filed for detailed description of substitutions, R-groups and preferred embodiments
  MOD_RES (14)..(14): Any L- or D-natural amino acid and any non-natural amino acid; see specification as filed for detailed description of substitutions, R-groups and preferred embodiments
  MOD_RES (15)..(18): Any L- or D-natural or non-natural amino acid, and this range may encompass 1 or 4 residues; see specification as filed for detailed description of substitutions, R-groups and preferred embodiments
  c-term may be amidated
XPLSRTVRXTXISXXXXXLNPESKAIKNLLK

SEQ ID NO: 253 - protein, 31 aa, Artificial Sequence
  Description of Artificial Sequence: Synthetic peptide
  MOD_RES (2)..(2): Any L- or D-natural amino acid and any non-natural amino acid; see specification as filed for detailed description of substitutions, R-groups and preferred embodiments
  MOD_RES (9)..(9): Any L- or D-natural amino acid and any non-natural amino acid; see specification as filed for detailed description of substitutions, R-groups and preferred embodiments
  MOD_RES (11)..(11): Any L- or D-natural amino acid and any non-natural amino acid; see specification as filed for detailed description of substitutions, R-groups and preferred embodiments
  MOD_RES (14)..(14): Any L- or D-natural amino acid and any non-natural amino acid; see specification as filed for detailed description of substitutions, R-groups and preferred embodiments
  MOD_RES (15)..(18): Any L- or D-natural or non-natural amino acid, and this range may encompass 1 or 4 residues; see specification as filed for detailed description of substitutions, R-groups and preferred embodiments
  c-term may be amidated
VXLSRTVRXTXISXXXXXLNPESKAIKNLLK

SEQ ID NO: 254 - protein, 31 aa, Artificial Sequence
  Description of Artificial Sequence: Synthetic peptide
  MOD_RES (3)..(3): Any L- or D-natural amino acid and any non-natural amino acid; see specification as filed for detailed description of substitutions, R-groups and preferred embodiments
  MOD_RES (9)..(9): Any L- or D-natural amino acid and any non-natural amino acid; see specification as filed for detailed description of substitutions, R-groups and preferred embodiments
  MOD_RES (11)..(11): Any L- or D-natural amino acid and any non-natural amino acid; see specification as filed for detailed description of substitutions, R-groups and preferred embodiments
  MOD_RES (14)..(14): Any L- or D-natural amino acid and any non-natural amino acid; see specification as filed for detailed description of substitutions, R-groups and preferred embodiments
  MOD_RES (15)..(18): Any L- or D-natural or non-natural amino acid, and this range may encompass 1 or 4 residues; see specification as filed for detailed description of substitutions, R-groups and preferred embodiments
  c-term may be amidated
VPXSRTVRXTXISXXXXXLNPESKAIKNLLK

SEQ ID NO: 255 - protein, 31 aa, Artificial Sequence
  Description of Artificial Sequence: Synthetic peptide
  MOD_RES (4)..(4): Any L- or D-natural amino acid and any non-natural amino acid; see specification as filed for detailed description of substitutions, R-groups and preferred embodiments
  MOD_RES (9)..(9): Any L- or D-natural amino acid and any non-natural amino acid; see specification as filed for detailed description of substitutions, R-groups and preferred embodiments
  MOD_RES (11)..(11): Any L- or D-natural amino acid and any non-natural amino acid; see specification as filed for detailed description of substitutions, R-groups and preferred embodiments
  MOD_RES (14)..(14): Any L- or D-natural amino acid and any non-natural amino acid; see specification as filed for detailed description of substitutions, R-groups and preferred embodiments
  MOD_RES (15)..(18): Any L- or D-natural or non-natural amino acid, and this range may encompass 1 or 4 residues; see specification as filed for detailed description of substitutions, R-groups and preferred embodiments
  c-term may be amidated
VPLXRTVRXTXISXXXXXLNPESKAIKNLLK

SEQ ID NO: 256 - protein, 31 aa, Artificial Sequence
  Description of Artificial Sequence: Synthetic peptide
  MOD_RES (5)..(5): Any L- or D-natural amino acid and any non-natural amino acid; see specification as filed for detailed description of substitutions, R-groups and preferred embodiments
  MOD_RES (9)..(9): Any L- or D-natural amino acid and any non-natural amino acid; see specification as filed for detailed description of substitutions, R-groups and preferred embodiments
  MOD_RES (11)..(11): Any L- or D-natural amino acid and any non-natural amino acid; see specification as filed for detailed description of substitutions, R-groups and preferred embodiments
  MOD_RES (14)..(14): Any L- or D-natural amino acid and any non-natural amino acid; see specification as filed for detailed description of substitutions, R-groups and preferred embodiments
  MOD_RES (15)..(18): Any L- or D-natural or non-natural amino acid, and this range may encompass 1 or 4 residues; see specification as filed for detailed description of substitutions, R-groups and preferred embodiments
  c-term may be amidated
VPLSXTVRXTXISXXXXXLNPESKAIKNLLK

SEQ ID NO: 257 - protein, 31 aa, Artificial Sequence
  Description of Artificial Sequence: Synthetic peptide
  MOD_RES (6)..(6): Any L- or D-natural amino acid and any non-natural amino acid; see specification as filed for detailed description of substitutions, R-groups and preferred embodiments
  MOD_RES (9)..(9): Any L- or D-natural amino acid and any non-natural amino acid; see specification as filed for detailed description of substitutions, R-groups and preferred embodiments
  MOD_RES (11)..(11): Any L- or D-natural amino acid and any non-natural amino acid; see specification as filed for detailed description of substitutions, R-groups and preferred embodiments
  MOD_RES (14)..(14): Any L- or D-natural amino acid and any non-natural amino acid; see specification as filed for detailed description of substitutions, R-groups and preferred embodiments
  MOD_RES (15)..(18): Any L- or D-natural or non-natural amino acid, and this range may encompass 1 or 4 residues; see specification as filed for detailed description of substitutions, R-groups and preferred embodiments
  c-term may be amidated
VPLSRXVRXTXISXXXXXLNPESKAIKNLLK

SEQ ID NO: 258 - protein, 31 aa, Artificial Sequence
  Description of Artificial Sequence: Synthetic peptide
  MOD_RES (7)..(7): Any L- or D-natural amino acid and any non-natural amino acid; see specification as filed for detailed description of substitutions, R-groups and preferred embodiments
  MOD_RES (9)..(9): Any L- or D-natural amino acid and any non-natural amino acid; see specification as filed for detailed description of substitutions, R-groups and preferred embodiments
  MOD_RES (11)..(11): Any L- or D-natural amino acid and any non-natural amino acid; see specification as filed for detailed description of substitutions, R-groups and preferred embodiments
  MOD_RES (14)..(14): Any L- or D-natural amino acid and any non-natural amino acid; see specification as filed for detailed description of substitutions, R-groups and preferred embodiments
  MOD_RES (15)..(18): Any L- or D-natural or non-natural amino acid, and this range may encompass 1 or 4 residues; see specification as filed for detailed description of substitutions, R-groups and preferred embodiments
  c-term may be amidated
VPLSRTXRXTXISXXXXXLNPESKAIKNLLK

SEQ ID NO: 259 - protein, 31 aa, Artificial Sequence
  Description of Artificial Sequence: Synthetic peptide
  MOD_RES (8)..(9): Any L- or D-natural amino acid and any non-natural amino acid; see specification as filed for detailed description of substitutions, R-groups and preferred embodiments
  MOD_RES (11)..(11): Any L- or D-natural amino acid and any non-natural amino acid; see specification as filed for detailed description of substitutions, R-groups and preferred embodiments
  MOD_RES (14)..(14): Any L- or D-natural amino acid and any non-natural amino acid; see specification as filed for detailed description of substitutions, R-groups and preferred embodiments
  MOD_RES (15)..(18): Any L- or D-natural or non-natural amino acid, and this range may encompass 1 or 4 residues; see specification as filed for detailed description of substitutions, R-groups and preferred embodiments
  c-term may be amidated
VPLSRTVXXTXISXXXXXLNPESKAIKNLLK

SEQ ID NO: 260 - protein, 31 aa, Artificial Sequence
  Description of Artificial Sequence: Synthetic peptide
  MOD_RES (15)..(18): Any L- or D-natural or non-natural amino acid, and this range may encompass 1 or 4 residues; see specification as filed for detailed description of substitutions, R-groups and preferred embodiments
  c-term may be amidated
VPLSRTVRCTCISIXXXXKAIKNLLKAVSKE

SEQ ID NO: 261 - protein, 31 aa, Artificial Sequence
  Description of Artificial Sequence: Synthetic peptide
  MOD_RES (1)..(1): Any L- or D-natural amino acid and any non-natural amino acid; see specification as filed for detailed description of substitutions, R-groups and preferred embodiments
  MOD_RES (9)..(9): Any L- or D-natural amino acid and any non-natural amino acid; see specification as filed for detailed description of substitutions, R-groups and preferred embodiments
  MOD_RES (11)..(11): Any L- or D-natural amino acid and any non-natural amino acid; see specification as filed for detailed description of substitutions, R-groups and preferred embodiments
  MOD_RES (15)..(18): Any L- or D-natural or non-natural amino acid, and this range may encompass 1 or 4 residues; see specification as filed for detailed description of substitutions, R-groups and preferred embodiments
  c-term may be amidated
XPLSRTVRXTXISIXXXXKAIKNLLKAVSKE

SEQ ID NO: 262 - protein, 31 aa, Artificial Sequence
  Description of Artificial Sequence: Synthetic peptide
  MOD_RES (2)..(2): Any L- or D-natural amino acid and any non-natural amino acid; see specification as filed for detailed description of substitutions, R-groups and preferred embodiments
  MOD_RES (9)..(9): Any L- or D-natural amino acid and any non-natural amino acid; see specification as filed for detailed description of substitutions, R-groups and preferred embodiments
  MOD_RES (11)..(11): Any L- or D-natural amino acid and any non-natural amino acid; see specification as filed for detailed description of substitutions, R-groups and preferred embodiments
  MOD_RES (15)..(18): Any L- or D-natural or non-natural amino acid, and this range may encompass 1 or 4 residues; see specification as filed for detailed description of substitutions, R-groups and preferred embodiments
  c-term may be amidated
VXLSRTVRXTXISIXXXXKAIKNLLKAVSKE

SEQ ID NO: 263 - protein, 31 aa, Artificial Sequence
  Description of Artificial Sequence: Synthetic peptide
  MOD_RES (3)..(3): Any L- or D-natural amino acid and any non-natural amino acid; see specification as filed for detailed description of substitutions, R-groups and preferred embodiments
  MOD_RES (9)..(9): Any L- or D-natural amino acid and any non-natural amino acid; see specification as filed for detailed description of substitutions, R-groups and preferred embodiments
  MOD_RES (11)..(11): Any L- or D-natural amino acid and any non-natural amino acid; see specification as filed for detailed description of substitutions, R-groups and preferred embodiments
  MOD_RES (15)..(18): Any L- or D-natural or non-natural amino acid, and this range may encompass 1 or 4 residues; see specification as filed for detailed description of substitutions, R-groups and preferred embodiments
  c-term may be amidated
VPXSRTVRXTXISIXXXXKAIKNLLKAVSKE

SEQ ID NO: 264 - protein, 31 aa, Artificial Sequence
  Description of Artificial Sequence: Synthetic peptide
  MOD_RES (4)..(4): Any L- or D-natural amino acid and any non-natural amino acid; see specification as filed for detailed description of substitutions, R-groups and preferred embodiments
  MOD_RES (9)..(9): Any L- or D-natural amino acid and any non-natural amino acid; see specification as filed for detailed description of substitutions, R-groups and preferred embodiments
  MOD_RES (11)..(11): Any L- or D-natural amino acid and any non-natural amino acid; see specification as filed for detailed description of substitutions, R-groups and preferred embodiments
  MOD_RES (15)..(18): Any L- or D-natural or non-natural amino acid, and this range may encompass 1 or 4 residues; see specification as filed for detailed description of substitutions, R-groups and preferred embodiments
  c-term may be amidated
VPLXRTVRXTXISIXXXXKAIKNLLKAVSKE

SEQ ID NO: 265 - protein, 31 aa, Artificial Sequence
  Description of Artificial Sequence: Synthetic peptide
  MOD_RES (5)..(5): Any L- or D-natural amino acid and any non-natural amino acid; see specification as filed for detailed description of substitutions, R-groups and preferred embodiments
  MOD_RES (9)..(9): Any L- or D-natural amino acid and any non-natural amino acid; see specification as filed for detailed description of substitutions, R-groups and preferred embodiments
  MOD_RES (11)..(11): Any L- or D-natural amino acid and any non-natural amino acid; see specification as filed for detailed description of substitutions, R-groups and preferred embodiments
  MOD_RES (15)..(18): Any L- or D-natural or non-natural amino acid, and this range may encompass 1 or 4 residues; see specification as filed for detailed description of substitutions, R-groups and preferred embodiments
  c-term may be amidated
VPLSXTVRXTXISIXXXXKAIKNLLKAVSKE

SEQ ID NO: 266 - protein, 31 aa, Artificial Sequence
  Description of Artificial Sequence: Synthetic peptide
  MOD_RES (6)..(6): Any L- or D-natural amino acid and any non-natural amino acid; see specification as filed for detailed description of substitutions, R-groups and preferred embodiments
  MOD_RES (9)..(9): Any L- or D-natural amino acid and any non-natural amino acid; see specification as filed for detailed description of substitutions, R-groups and preferred embodiments
  MOD_RES (11)..(11): Any L- or D-natural amino acid and any non-natural amino acid; see specification as filed for detailed description of substitutions, R-groups and preferred embodiments
  MOD_RES (15)..(18): Any L- or D-natural or non-natural amino acid, and this range may encompass 1 or 4 residues; see specification as filed for detailed description of substitutions, R-groups and preferred embodiments
  c-term may be amidated
VPLSRXVRXTXISIXXXXKAIKNLLKAVSKE

SEQ ID NO: 267 - protein, 31 aa, Artificial Sequence
  Description of Artificial Sequence: Synthetic peptide
  MOD_RES (7)..(7): Any L- or D-natural amino acid and any non-natural amino acid; see specification as filed for detailed description of substitutions, R-groups and preferred embodiments
  MOD_RES (9)..(9): Any L- or D-natural amino acid and any non-natural amino acid; see specification as filed for detailed description of substitutions, R-groups and preferred embodiments
  MOD_RES (11)..(11): Any L- or D-natural amino acid and any non-natural amino acid; see specification as filed for detailed description of substitutions, R-groups and preferred embodiments
  MOD_RES (15)..(18): Any L- or D-natural or non-natural amino acid, and this range may encompass 1 or 4 residues; see specification as filed for detailed description of substitutions, R-groups and preferred embodiments
  c-term may be amidated
VPLSRTXRXTXISIXXXXKAIKNLLKAVSKE

SEQ ID NO: 268 - protein, 31 aa, Artificial Sequence
  Description of Artificial Sequence: Synthetic peptide
  MOD_RES (8)..(9): Any L- or D-natural amino acid and any non-natural amino acid; see specification as filed for detailed description of substitutions, R-groups and preferred embodiments
  MOD_RES (11)..(11): Any L- or D-natural amino acid and any non-natural amino acid; see specification as filed for detailed description of substitutions, R-groups and preferred embodiments
  MOD_RES (15)..(18): Any L- or D-natural or non-natural amino acid, and this range may encompass 1 or 4 residues; see specification as filed for detailed description of substitutions, R-groups and preferred embodiments
  c-term may be amidated
VPLSRTVXXTXISIXXXXKAIKNLLKAVSKE

SEQ ID NO: 269 - protein, 31 aa, Artificial Sequence
  Description of Artificial Sequence: Synthetic peptide
  MOD_RES (12)..(12): Any L- or D-natural amino acid and any non-natural amino acid; see specification as filed for detailed description of substitutions, R-groups and preferred embodiments
  MOD_RES (15)..(18): Any L- or D-natural or non-natural amino acid, and this range may encompass 1 or 4 residues; see specification as filed for detailed description of substitutions, R-groups and preferred embodiments
  c-term may be amidated
VPLSRTVRCTCXSIXXXXKAIKNLLKAVSKE

SEQ ID NO: 270 - protein, 31 aa, Artificial Sequence
  Description of Artificial Sequence: Synthetic peptide
  MOD_RES (1)..(1): Any L- or D-natural amino acid and any non-natural amino acid; see specification as filed for detailed description of substitutions, R-groups and preferred embodiments
  MOD_RES (9)..(9): Any L- or D-natural amino acid and any non-natural amino acid; see specification as filed for detailed description of substitutions, R-groups and preferred embodiments
  MOD_RES (11)..(12): Any L- or D-natural amino acid and any non-natural amino acid; see specification as filed for detailed description of substitutions, R-groups and preferred embodiments
  MOD_RES (15)..(18): Any L- or D-natural or non-natural amino acid, and this range may encompass 1 or 4 residues; see specification as filed for detailed description of substitutions, R-groups and preferred embodiments
  c-term may be amidated
XPLSRTVRXTXXSIXXXXKAIKNLLKAVSKE

SEQ ID NO: 271 - protein, 31 aa, Artificial Sequence
  Description of Artificial Sequence: Synthetic peptide
  MOD_RES (2)..(2): Any L- or D-natural amino acid and any non-natural amino acid; see specification as filed for detailed description of substitutions, R-groups and preferred embodiments
  MOD_RES (9)..(9): Any L- or D-natural amino acid and any non-natural amino acid; see specification as filed for detailed description of substitutions, R-groups and preferred embodiments
  MOD_RES (11)..(12): Any L- or D-natural amino acid and any non-natural amino acid; see specification as filed for detailed description of substitutions, R-groups and preferred embodiments
  MOD_RES (15)..(18): Any L- or D-natural or non-natural amino acid, and this range may encompass 1 or 4 residues; see specification as filed for detailed description of substitutions, R-groups and preferred embodiments
  c-term may be amidated
VXLSRTVRXTXXSIXXXXKAIKNLLKAVSKE

SEQ ID NO: 272 - protein, 31 aa, Artificial Sequence
  Description of Artificial Sequence: Synthetic peptide
  MOD_RES (3)..(3): Any L- or D-natural amino acid and any non-natural amino acid; see specification as filed for detailed description of substitutions, R-groups and preferred embodiments
  MOD_RES (9)..(9): Any L- or D-natural amino acid and any non-natural amino acid; see specification as filed for detailed description of substitutions, R-groups and preferred embodiments
  MOD_RES (11)..(12): Any L- or D-natural amino acid and any non-natural amino acid; see specification as filed for detailed description of substitutions, R-groups and preferred embodiments
  MOD_RES (15)..(18): Any L- or D-natural or non-natural amino acid, and this range may encompass 1 or 4 residues; see specification as filed for detailed description of substitutions, R-groups and preferred embodiments
  c-term may be amidated
VPXSRTVRXTXXSIXXXXKAIKNLLKAVSKE

SEQ ID NO: 273 - protein, 31 aa, Artificial Sequence
  Description of Artificial Sequence: Synthetic peptide
  MOD_RES (4)..(4): Any L- or D-natural amino acid and any non-natural amino acid; see specification as filed for detailed description of substitutions, R-groups and preferred embodiments
  MOD_RES (9)..(9): Any L- or D-natural amino acid and any non-natural amino acid; see specification as filed for detailed description of substitutions, R-groups and preferred embodiments
  MOD_RES (11)..(12): Any L- or D-natural amino acid and any non-natural amino acid; see specification as filed for detailed description of substitutions, R-groups and preferred embodiments
  MOD_RES (15)..(18): Any L- or D-natural or non-natural amino acid, and this range may encompass 1 or 4 residues; see specification as filed for detailed description of substitutions, R-groups and preferred embodiments
  c-term may be amidated
VPLXRTVRXTXXSIXXXXKAIKNLLKAVSKE

SEQ ID NO: 274 - protein, 31 aa, Artificial Sequence
  Description of Artificial Sequence: Synthetic peptide
  MOD_RES (5)..(5): Any L- or D-natural amino acid and any non-natural amino acid; see specification as filed for detailed description of substitutions, R-groups and preferred embodiments
  MOD_RES (9)..(9): Any L- or D-natural amino acid and any non-natural amino acid; see specification as filed for detailed description of substitutions, R-groups and preferred embodiments
  MOD_RES (11)..(12): Any L- or D-natural amino acid and any non-natural amino acid; see specification as filed for detailed description of substitutions, R-groups and preferred embodiments
  MOD_RES (15)..(18): Any L- or D-natural or non-natural amino acid, and this range may encompass 1 or 4 residues; see specification as filed for detailed description of substitutions, R-groups and preferred embodiments
  c-term may be amidated
VPLSXTVRXTXXSIXXXXKAIKNLLKAVSKE

SEQ ID NO: 275 - protein, 31 aa, Artificial Sequence
  Description of Artificial Sequence: Synthetic peptide
  MOD_RES (6)..(6): Any L- or D-natural amino acid and any non-natural amino acid; see specification as filed for detailed description of substitutions, R-groups and preferred embodiments
  MOD_RES (9)..(9): Any L- or D-natural amino acid and any non-natural amino acid; see specification as filed for detailed description of substitutions, R-groups and preferred embodiments
  MOD_RES (11)..(12): Any L- or D-natural amino acid and any non-natural amino acid; see specification as filed for detailed description of substitutions, R-groups and preferred embodiments
  MOD_RES (15)..(18): Any L- or D-natural or non-natural amino acid, and this range may encompass 1 or 4 residues; see specification as filed for detailed description of substitutions, R-groups and preferred embodiments
  c-term may be amidated
VPLSRXVRXTXXSIXXXXKAIKNLLKAVSKE

SEQ ID NO: 276 - protein, 31 aa, Artificial Sequence
  Description of Artificial Sequence: Synthetic peptide
  MOD_RES (7)..(7): Any L- or D-natural amino acid and any non-natural amino acid; see specification as filed for detailed description of substitutions, R-groups and preferred embodiments
  MOD_RES (9)..(9): Any L- or D-natural amino acid and any non-natural amino acid; see specification as filed for detailed description of substitutions, R-groups and preferred embodiments
  MOD_RES (11)..(12): Any L- or D-natural amino acid and any non-natural amino acid; see specification as filed for detailed description of substitutions, R-groups and preferred embodiments
  MOD_RES (15)..(18): Any L- or D-natural or non-natural amino acid, and this range may encompass 1 or 4 residues; see specification as filed for detailed description of substitutions, R-groups and preferred embodiments
  c-term may be amidated
VPLSRTXRXTXXSIXXXXKAIKNLLKAVSKE

SEQ ID NO: 277 - protein, 31 aa, Artificial Sequence
  Description of Artificial Sequence: Synthetic peptide
  MOD_RES (8)..(9): Any L- or D-natural amino acid and any non-natural amino acid; see specification as filed for detailed description of substitutions, R-groups and preferred embodiments
  MOD_RES (11)..(12): Any L- or D-natural amino acid and any non-natural amino acid; see specification as filed for detailed description of substitutions, R-groups and preferred embodiments
  MOD_RES (15)..(18): Any L- or D-natural or non-natural amino acid, and this range may encompass 1 or 4 residues; see specification as filed for detailed description of substitutions, R-groups and preferred embodiments
  c-term may be amidated
VPLSRTVXXTXXSIXXXXKAIKNLLKAVSKE

SEQ ID NO: 278 - protein, 31 aa, Artificial Sequence
  Description of Artificial Sequence: Synthetic peptide
  MOD_RES (13)..(13): Any L- or D-natural amino acid and any non-natural amino acid; see specification as filed for detailed description of substitutions, R-groups and preferred embodiments
  MOD_RES (15)..(18): Any L- or D-natural or non-natural amino acid, and this range may encompass 1 or 4 residues; see specification as filed for detailed description of substitutions, R-groups and preferred embodiments
  c-term may be amidated
VPLSRTVRCTCIXIXXXXKAIKNLLKAVSKE

SEQ ID NO: 279 - protein, 31 aa, Artificial Sequence
  Description of Artificial Sequence: Synthetic peptide
  MOD_RES (1)..(1): Any L- or D-natural amino acid and any non-natural amino acid; see specification as filed for detailed description of substitutions, R-groups and preferred embodiments
  MOD_RES (9)..(9): Any L- or D-natural amino acid and any non-natural amino acid; see specification as filed for detailed description of substitutions, R-groups and preferred embodiments
  MOD_RES (11)..(11): Any L- or D-natural amino acid and any non-natural amino acid; see specification as filed for detailed description of substitutions, R-groups and preferred embodiments
  MOD_RES (13)..(13): Any L- or D-natural amino acid and any non-natural amino acid; see specification as filed for detailed description of substitutions, R-groups and preferred embodiments
  MOD_RES (15)..(18): Any L- or D-natural or non-natural amino acid, and this range may encompass 1 or 4 residues; see specification as filed for detailed description of substitutions, R-groups and preferred embodiments
  c-term may be amidated
XPLSRTVRXTXIXIXXXXKAIKNLLKAVSKE

SEQ ID NO: 280 - protein, 31 aa, Artificial Sequence
  Description of Artificial Sequence: Synthetic peptide
  MOD_RES (2)..(2): Any L- or D-natural amino acid and any non-natural amino acid; see specification as filed for detailed description of substitutions, R-groups and preferred embodiments
  MOD_RES (9)..(9): Any L- or D-natural amino acid and any non-natural amino acid; see specification as filed for detailed description of substitutions, R-groups and preferred embodiments
  MOD_RES (11)..(11): Any L- or D-natural amino acid and any non-natural amino acid; see specification as filed for detailed description of substitutions, R-groups and preferred embodiments
  MOD_RES (13)..(13): Any L- or D-natural amino acid and any non-natural amino acid; see specification as filed for detailed description of substitutions, R-groups and preferred embodiments
  MOD_RES (15)..(18): Any L- or D-natural or non-natural amino acid, and this range may encompass 1 or 4 residues; see specification as filed for detailed description of substitutions, R-groups and preferred embodiments
  c-term may be amidated
VXLSRTVRXTXIXIXXXXKAIKNLLKAVSKE

SEQ ID NO: 281 - protein, 31 aa, Artificial Sequence
  Description of Artificial Sequence: Synthetic peptide
  MOD_RES (3)..(3): Any L- or D-natural amino acid and any non-natural amino acid; see specification as filed for detailed description of substitutions, R-groups and preferred embodiments
  MOD_RES (9)..(9): Any L- or D-natural amino acid and any non-natural amino acid; see specification as filed for detailed description of substitutions, R-groups and preferred embodiments
  MOD_RES (11)..(11): Any L- or D-natural amino acid and any non-natural amino acid; see specification as filed for detailed description of substitutions, R-groups and preferred embodiments
  MOD_RES (13)..(13): Any L- or D-natural amino acid and any non-natural amino acid; see specification as filed for detailed description of substitutions, R-groups and preferred embodiments
  MOD_RES (15)..(18): Any L- or D-natural or non-natural amino acid, and this range may encompass 1 or 4 residues; see specification as filed for detailed description of substitutions, R-groups and preferred embodiments
  c-term may be amidated
VPXSRTVRXTXIXIXXXXKAIKNLLKAVSKE

SEQ ID NO: 282 - protein, 31 aa, Artificial Sequence
  Description of Artificial Sequence: Synthetic peptide
  MOD_RES (4)..(4): Any L- or D-natural amino acid and any non-natural amino acid; see specification as filed for detailed description of substitutions, R-groups and preferred embodiments
  MOD_RES (9)..(9): Any L- or D-natural amino acid and any non-natural amino acid; see specification as filed for detailed description of substitutions, R-groups and preferred embodiments
  MOD_RES (11)..(11): Any L- or D-natural amino acid and any non-natural amino acid; see specification as filed for detailed description of substitutions, R-groups and preferred embodiments
  MOD_RES (13)..(13): Any L- or D-natural amino acid and any non-natural amino acid; see specification as filed for detailed description of substitutions, R-groups and preferred embodiments
  MOD_RES (15)..(18): Any L- or D-natural or non-natural amino acid, and this range may encompass 1 or 4 residues; see specification as filed for detailed description of substitutions, R-groups and preferred embodiments
  c-term may be amidated
VPLXRTVRXTXIXIXXXXKAIKNLLKAVSKE

SEQ ID NO: 283 - protein, 31 aa, Artificial Sequence
  Description of Artificial Sequence: Synthetic peptide
  MOD_RES (5)..(5): Any L- or D-natural amino acid and any non-natural amino acid; see specification as filed for detailed description of substitutions, R-groups and preferred embodiments
  MOD_RES (9)..(9): Any L- or D-natural amino acid and any non-natural amino acid; see specification as filed for detailed description of substitutions, R-groups and preferred embodiments
  MOD_RES (11)..(11): Any L- or D-natural amino acid and any non-natural amino acid; see specification as filed for detailed description of substitutions, R-groups and preferred embodiments
  MOD_RES (13)..(13): Any L- or D-natural amino acid and any non-natural amino acid; see specification as filed for detailed description of substitutions, R-groups and preferred embodiments
  MOD_RES (15)..(18): Any L- or D-natural or non-natural amino acid, and this range may encompass 1 or 4 residues; see specification as filed for detailed description of substitutions, R-groups and preferred embodiments
  c-term may be amidated
VPLSXTVRXTXIXIXXXXKAIKNLLKAVSKE

SEQ ID NO: 284 - protein, 31 aa, Artificial Sequence
  Description of Artificial Sequence: Synthetic peptide
  MOD_RES (6)..(6): Any L- or D-natural amino acid and any non-natural amino acid; see specification as filed for detailed description of substitutions, R-groups and preferred embodiments
  MOD_RES (9)..(9): Any L- or D-natural amino acid and any non-natural amino acid; see specification as filed for detailed description of substitutions, R-groups and preferred embodiments
  MOD_RES (11)..(11): Any L- or D-natural amino acid and any non-natural amino acid; see specification as filed for detailed description of substitutions, R-groups and preferred embodiments
  MOD_RES (13)..(13): Any L- or D-natural amino acid and any non-natural amino acid; see specification as filed for detailed description of substitutions, R-groups and preferred embodiments
  MOD_RES (15)..(18): Any L- or D-natural or non-natural amino acid, and this range may encompass 1 or 4 residues; see specification as filed for detailed description of substitutions, R-groups and preferred embodiments
  c-term may be amidated
VPLSRXVRXTXIXIXXXXKAIKNLLKAVSKE

SEQ ID NO: 285 - protein, 31 aa, Artificial Sequence
  Description of Artificial Sequence: Synthetic peptide
  MOD_RES (7)..(7): Any L- or D-natural amino acid and any non-natural amino acid; see specification as filed for detailed description of substitutions, R-groups and preferred embodiments
  MOD_RES (9)..(9): Any L- or D-natural amino acid and any non-natural amino acid; see specification as filed for detailed description of substitutions, R-groups and preferred embodiments
  MOD_RES (11)..(11): Any L- or D-natural amino acid and any non-natural amino acid; see specification as filed for detailed description of substitutions, R-groups and preferred embodiments
  MOD_RES (13)..(13): Any L- or D-natural amino acid and any non-natural amino acid; see specification as filed for detailed description of substitutions, R-groups and preferred embodiments
  MOD_RES (15)..(18): Any L- or D-natural or non-natural amino acid, and this range may encompass 1 or 4 residues; see specification as filed for detailed description of substitutions, R-groups and preferred embodiments
  c-term may be amidated
VPLSRTXRXTXIXIXXXXKAIKNLLKAVSKE

SEQ ID NO: 286 - protein, 31 aa, Artificial Sequence
  Description of Artificial Sequence: Synthetic peptide
  MOD_RES (8)..(9): Any L- or D-natural amino acid and any non-natural amino acid; see specification as filed for detailed description of substitutions, R-groups and preferred embodiments
  MOD_RES (11)..(11): Any L- or D-natural amino acid and any non-natural amino acid; see specification as filed for detailed description of substitutions, R-groups and preferred embodiments
  MOD_RES (13)..(13): Any L- or D-natural amino acid and any non-natural amino acid; see specification as filed for detailed description of substitutions, R-groups and preferred embodiments
  MOD_RES (15)..(18): Any L- or D-natural or non-natural amino acid, and this range may encompass 1 or 4 residues; see specification as filed for detailed description of substitutions, R-groups and preferred embodiments
  c-term may be amidated
VPLSRTVXXTXIXIXXXXKAIKNLLKAVSKE

SEQ ID NO: 287 - protein, 31 aa, Artificial Sequence
  Description of Artificial Sequence: Synthetic peptide
  MOD_RES (14)..(18): Any L- or D-natural or non-natural amino acid, and this range may encompass 1 or 4 residues; see specification as filed for detailed description of substitutions, R-groups and preferred embodiments
  c-term may be amidated
VPLSRTVRCTCISXXXXXKAIKNLLKAVSKE

SEQ ID NO: 288 - protein, 31 aa, Artificial Sequence
  Description of Artificial Sequence: Synthetic peptide
  MOD_RES (1)..(1): Any L- or D-natural amino acid and any non-natural amino acid; see specification as filed for detailed description of substitutions, R-groups and preferred embodiments
  MOD_RES (9)..(9): Any L- or D-natural amino acid and any non-natural amino acid; see specification as filed for detailed description of substitutions, R-groups and preferred embodiments
  MOD_RES (11)..(11): Any L- or D-natural amino acid and any non-natural amino acid; see specification as filed for detailed description of substitutions, R-groups and preferred embodiments
  MOD_RES (14)..(14): Any L- or D-natural amino acid and any non-natural amino acid; see specification as filed for detailed description of substitutions, R-groups and preferred embodiments
  MOD_RES (15)..(18): Any L- or D-natural or non-natural amino acid, and this range may encompass 1 or 4 residues; see specification as filed for detailed description of substitutions, R-groups and preferred embodiments
  c-term may be amidated
XPLSRTVRXTXISXXXXXKAIKNLLKAVSKE

SEQ ID NO: 289 - protein, 31 aa, Artificial Sequence
  Description of Artificial Sequence: Synthetic peptide
  MOD_RES (2)..(2): Any L- or D-natural amino acid and any non-natural amino acid; see specification as filed for detailed description of substitutions, R-groups and preferred embodiments
  MOD_RES (9)..(9): Any L- or D-natural amino acid and any non-natural amino acid; see specification as filed for detailed description of substitutions, R-groups and preferred embodiments
  MOD_RES (11)..(11): Any L- or D-natural amino acid and any non-natural amino acid; see specification as filed for detailed description of substitutions, R-groups and preferred embodiments
  MOD_RES (14)..(14): Any L- or D-natural amino acid and any non-natural amino acid; see specification as filed for detailed description of substitutions, R-groups and preferred embodiments
  MOD_RES (15)..(18): Any L- or D-natural or non-natural amino acid, and this range may encompass 1 or 4 residues; see specification as filed for detailed description of substitutions, R-groups and preferred embodiments
  c-term may be amidated
VXLSRTVRXTXISXXXXXKAIKNLLKAVSKE

SEQ ID NO: 290 - protein, 31 aa, Artificial Sequence
  Description of Artificial Sequence: Synthetic peptide
  MOD_RES (3)..(3): Any L- or D-natural amino acid and any non-natural amino acid; see specification as filed for detailed description of substitutions, R-groups and preferred embodiments
  MOD_RES (9)..(9): Any L- or D-natural amino acid and any non-natural amino acid; see specification as filed for detailed description of substitutions, R-groups and preferred embodiments
  MOD_RES (11)..(11): Any L- or D-natural amino acid and any non-natural amino acid; see specification as filed for detailed description of substitutions, R-groups and preferred embodiments
  MOD_RES (14)..(14): Any L- or D-natural amino acid and any non-natural amino acid; see specification as filed for detailed description of substitutions, R-groups and preferred embodiments
  MOD_RES (15)..(18): Any L- or D-natural or non-natural amino acid, and this range may encompass 1 or 4 residues; see specification as filed for detailed description of substitutions, R-groups and preferred embodiments
  c-term may be amidated
VPXSRTVRXTXISXXXXXKAIKNLLKAVSKE

SEQ ID NO: 291 - protein, 31 aa, Artificial Sequence
  Description of Artificial Sequence: Synthetic peptide
  MOD_RES (4)..(4): Any L- or D-natural amino acid and any non-natural amino acid; see specification as filed for detailed description of substitutions, R-groups and preferred embodiments
  MOD_RES (9)..(9): Any L- or D-natural amino acid and any non-natural amino acid; see specification as filed for detailed description of substitutions, R-groups and preferred embodiments
  MOD_RES (11)..(11): Any L- or D-natural amino acid and any non-natural amino acid; see specification as filed for detailed description of substitutions, R-groups and preferred embodiments
  MOD_RES (14)..(14): Any L- or D-natural amino acid and any non-natural amino acid; see specification as filed for detailed description of substitutions, R-groups and preferred embodiments
  MOD_RES (15)..(18): Any L- or D-natural or non-natural amino acid, and this range may encompass 1 or 4 residues; see specification as filed for detailed description of substitutions, R-groups and preferred embodiments
  c-term may be amidated
VPLXRTVRXTXISXXXXXKAIKNLLKAVSKE

SEQ ID NO: 292 - protein, 31 aa, Artificial Sequence
  Description of Artificial Sequence: Synthetic peptide
  MOD_RES (5)..(5): Any L- or D-natural amino acid and any non-natural amino acid; see specification as filed for detailed description of substitutions, R-groups and preferred embodiments
  MOD_RES (9)..(9): Any L- or D-natural amino acid and any non-natural amino acid; see specification as filed for detailed description of substitutions, R-groups and preferred embodiments
  MOD_RES (11)..(11): Any L- or D-natural amino acid and any non-natural amino acid; see specification as filed for detailed description of substitutions, R-groups and preferred embodiments
  MOD_RES (14)..(14): Any L- or D-natural amino acid and any non-natural amino acid; see specification as filed for detailed description of substitutions, R-groups and preferred embodiments
  MOD_RES (15)..(18): Any L- or D-natural or non-natural amino acid, and this range may encompass 1 or 4 residues; see specification as filed for detailed description of substitutions, R-groups and preferred embodiments
  c-term may be amidated
VPLSXTVRXTXISXXXXXKAIKNLLKAVSKE

SEQ ID NO: 293 - protein, 31 aa, Artificial Sequence
  Description of Artificial Sequence: Synthetic peptide
  MOD_RES (6)..(6): Any L- or D-natural amino acid and any non-natural amino acid; see specification as filed for detailed description of substitutions, R-groups and preferred embodiments
  MOD_RES (9)..(9): Any L- or D-natural amino acid and any non-natural amino acid; see specification as filed for detailed description of substitutions, R-groups and preferred embodiments
  MOD_RES (11)..(11): Any L- or D-natural amino acid and any non-natural amino acid; see specification as filed for detailed description of substitutions, R-groups and preferred embodiments
  MOD_RES (14)..(14): Any L- or D-natural amino acid and any non-natural amino acid; see specification as filed for detailed description of substitutions, R-groups and preferred embodiments
  MOD_RES (15)..(18): Any L- or D-natural or non-natural amino acid, and this range may encompass 1 or 4 residues; see specification as filed for detailed description of substitutions, R-groups and preferred embodiments
  c-term may be amidated
VPLSRXVRXTXISXXXXXKAIKNLLKAVSKE

SEQ ID NO: 294 - protein, 31 aa, Artificial Sequence
  Description of Artificial Sequence: Synthetic peptide
  MOD_RES (7)..(7): Any L- or D-natural amino acid and any non-natural amino acid; see specification as filed for detailed description of substitutions, R-groups and preferred embodiments
  MOD_RES (9)..(9): Any L- or D-natural amino acid and any non-natural amino acid; see specification as filed for detailed description of substitutions, R-groups and preferred embodiments
  MOD_RES (11)..(11): Any L- or D-natural amino acid and any non-natural amino acid; see specification as filed for detailed description of substitutions, R-groups and preferred embodiments
  MOD_RES (14)..(14): Any L- or D-natural amino acid and any non-natural amino acid; see specification as filed for detailed description of substitutions, R-groups and preferred embodiments
  MOD_RES (15)..(18): Any L- or D-natural or non-natural amino acid, and this range may encompass 1 or 4 residues; see specification as filed for detailed description of substitutions, R-groups and preferred embodiments
  c-term may be amidated
VPLSRTXRXTXISXXXXXKAIKNLLKAVSKE

SEQ ID NO: 295 - protein, 31 aa, Artificial Sequence
  Description of Artificial Sequence: Synthetic peptide
  MOD_RES (8)..(9): Any L- or D-natural amino acid and any non-natural amino acid; see specification as filed for detailed description of substitutions, R-groups and preferred embodiments
  MOD_RES (11)..(11): Any L- or D-natural amino acid and any non-natural amino acid; see specification as filed for detailed description of substitutions, R-groups and preferred embodiments
  MOD_RES (14)..(14): Any L- or D-natural amino acid and any non-natural amino acid; see specification as filed for detailed description of substitutions, R-groups and preferred embodiments
  MOD_RES (15)..(18): Any L- or D-natural or non-natural amino acid, and this range may encompass 1 or 4 residues; see specification as filed for detailed description of substitutions, R-groups and preferred embodiments
  c-term may be amidated
VPLSRTVXXTXISXXXXXKAIKNLLKAVSKE

SEQ ID NO: 296 - protein, 34 aa, Artificial Sequence
  Description of Artificial Sequence: Synthetic peptide
  MOD_RES (18)..(21): Any L- or D-natural or non-natural amino acid, and this range may encompass 1 or 4 residues; see specification as filed for detailed description of substitutions, R-groups and preferred embodiments
  c-term may be amidated
VPLSRTVRCTCISISNQXXXXLKAVSKEMSKRSP

SEQ ID NO: 297 - protein, 34 aa, Artificial Sequence
  Description of Artificial Sequence: Synthetic peptide
  MOD_RES (1)..(1): Any L- or D-natural amino acid and any non-natural amino acid; see specification as filed for detailed description of substitutions, R-groups and preferred embodiments
  MOD_RES (9)..(9): Any L- or D-natural amino acid and any non-natural amino acid; see specification as filed for detailed description of substitutions, R-groups and preferred embodiments
  MOD_RES (11)..(11): Any L- or D-natural amino acid and any non-natural amino acid; see specification as filed for detailed description of substitutions, R-groups and preferred embodiments
  MOD_RES (18)..(21): Any L- or D-natural or non-natural amino acid, and this range may encompass 1 or 4 residues; see specification as filed for detailed description of substitutions, R-groups and preferred embodiments
  c-term may be amidated
XPLSRTVRXTXISISNQXXXXLKAVSKEMSKRSP

SEQ ID NO: 298 - protein, 34 aa, Artificial Sequence
  Description of Artificial Sequence: Synthetic peptide
  MOD_RES (2)..(2): Any L- or D-natural amino acid and any non-natural amino acid; see specification as filed for detailed description of substitutions, R-groups and preferred embodiments
  MOD_RES (9)..(9): Any L- or D-natural amino acid and any non-natural amino acid; see specification as filed for detailed description of substitutions, R-groups and preferred embodiments
  MOD_RES (11)..(11): Any L- or D-natural amino acid and any non-natural amino acid; see specification as filed for detailed description of substitutions, R-groups and preferred embodiments
  MOD_RES (18)..(21): Any L- or D-natural or non-natural amino acid, and this range may encompass 1 or 4 residues; see specification as filed for detailed description of substitutions, R-groups and preferred embodiments
  c-term may be amidated
VXLSRTVRXTXISISNQXXXXLKAVSKEMSKRSP

SEQ ID NO: 299 - protein, 34 aa, Artificial Sequence
  Description of Artificial Sequence: Synthetic peptide
  MOD_RES (3)..(3): Any L- or D-natural amino acid and any non-natural amino acid; see specification as filed for detailed description of substitutions, R-groups and preferred embodiments
  MOD_RES (9)..(9): Any L- or D-natural amino acid and any non-natural amino acid; see specification as filed for detailed description of substitutions, R-groups and preferred embodiments
  MOD_RES (11)..(11): Any L- or D-natural amino acid and any non-natural amino acid; see specification as filed for detailed description of substitutions, R-groups and preferred embodiments
  MOD_RES (18)..(21): Any L- or D-natural or non-natural amino acid, and this range may encompass 1 or 4 residues; see specification as filed for detailed description of substitutions, R-groups and preferred embodiments
  c-term may be amidated
VPXSRTVRXTXISISNQXXXXLKAVSKEMSKRSP

SEQ ID NO: 300 - protein, 34 aa, Artificial Sequence
  Description of Artificial Sequence: Synthetic peptide
  MOD_RES (4)..(4): Any L- or D-natural amino acid and any non-natural amino acid; see specification as filed for detailed description of substitutions, R-groups and preferred embodiments
  MOD_RES (9)..(9): Any L- or D-natural amino acid and any non-natural amino acid; see specification as filed for detailed description of substitutions, R-groups and preferred embodiments
  MOD_RES (11)..(11): Any L- or D-natural amino acid and any non-natural amino acid; see specification as filed for detailed description of substitutions, R-groups and preferred embodiments
  MOD_RES (18)..(21): Any L- or D-natural or non-natural amino acid, and this range may encompass 1 or 4 residues; see specification as filed for detailed description of substitutions, R-groups and preferred embodiments
  c-term may be amidated
VPLXRTVRXTXISISNQXXXXLKAVSKEMSKRSP

SEQ ID NO: 301 - protein, 34 aa, Artificial Sequence
  Description of Artificial Sequence: Synthetic peptide
  MOD_RES (5)..(5): Any L- or D-natural amino acid and any non-natural amino acid; see specification as filed for detailed description of substitutions, R-groups and preferred embodiments
  MOD_RES (9)..(9): Any L- or D-natural amino acid and any non-natural amino acid; see specification as filed for detailed description of substitutions, R-groups and preferred embodiments
  MOD_RES (11)..(11): Any L- or D-natural amino acid and any non-natural amino acid; see specification as filed for detailed description of substitutions, R-groups and preferred embodiments
  MOD_RES (18)..(21): Any L- or D-natural or non-natural amino acid, and this range may encompass 1 or 4 residues; see specification as filed for detailed description of substitutions, R-groups and preferred embodiments
  c-term may be amidated
VPLSXTVRXTXISISNQXXXXLKAVSKEMSKRSP

SEQ ID NO: 302 - protein, 34 aa, Artificial Sequence
  Description of Artificial Sequence: Synthetic peptide
  MOD_RES (6)..(6): Any L- or D-natural amino acid and any non-natural amino acid; see specification as filed for detailed description of substitutions, R-groups and preferred embodiments
  MOD_RES (9)..(9): Any L- or D-natural amino acid and any non-natural amino acid; see specification as filed for detailed description of substitutions, R-groups and preferred embodiments
  MOD_RES (11)..(11): Any L- or D-natural amino acid and any non-natural amino acid; see specification as filed for detailed description of substitutions, R-groups and preferred embodiments
  MOD_RES (18)..(21): Any L- or D-natural or non-natural amino acid, and this range may encompass 1 or 4 residues; see specification as filed for detailed description of substitutions, R-groups and preferred embodiments
  c-term may be amidated
VPLSRXVRXTXISISNQXXXXLKAVSKEMSKRSP

SEQ ID NO: 303 - protein, 34 aa, Artificial Sequence
  Description of Artificial Sequence: Synthetic peptide
  MOD_RES (7)..(7): Any L- or D-natural amino acid and any non-natural amino acid; see specification as filed for detailed description of substitutions, R-groups and preferred embodiments
  MOD_RES (9)..(9): Any L- or D-natural amino acid and any non-natural amino acid; see specification as filed for detailed description of substitutions, R-groups and preferred embodiments
  MOD_RES (11)..(11): Any L- or D-natural amino acid and any non-natural amino acid; see specification as filed for detailed description of substitutions, R-groups and preferred embodiments
  MOD_RES (18)..(21): Any L- or D-natural or non-natural amino acid, and this range may encompass 1 or 4 residues; see specification as filed for detailed description of substitutions, R-groups and preferred embodiments
  c-term may be amidated
VPLSRTXRXTXISISNQXXXXLKAVSKEMSKRSP

SEQ ID NO: 304 - protein, 34 aa, Artificial Sequence
  Description of Artificial Sequence: Synthetic peptide
  MOD_RES (8)..(9): Any L- or D-natural amino acid and any non-natural amino acid; see specification as filed for detailed description of substitutions, R-groups and preferred embodiments
  MOD_RES (11)..(11): Any L- or D-natural amino acid and any non-natural amino acid; see specification as filed for detailed description of substitutions, R-groups and preferred embodiments
  MOD_RES (18)..(21): Any L- or D-natural or non-natural amino acid, and this range may encompass 1 or 4 residues; see specification as filed for detailed description of substitutions, R-groups and preferred embodiments
  c-term may be amidated
VPLSRTVXXTXISISNQXXXXLKAVSKEMSKRSP

SEQ ID NO: 305 - protein, 34 aa, Artificial Sequence
  Description of Artificial Sequence: Synthetic peptide
  MOD_RES (12)..(12): Any L- or D-natural amino acid and any non-natural amino acid; see specification as filed for detailed description of substitutions, R-groups and preferred embodiments
  MOD_RES (18)..(21): Any L- or D-natural or non-natural amino acid, and this range may encompass 1 or 4 residues; see specification as filed for detailed description of substitutions, R-groups and preferred embodiments
  c-term may be amidated
VPLSRTVRCTCXSISNQXXXXLKAVSKEMSKRSP

SEQ ID NO: 306 - protein, 34 aa, Artificial Sequence
  Description of Artificial Sequence: Synthetic peptide
  MOD_RES (1)..(1): Any L- or D-natural amino acid and any non-natural amino acid; see specification as filed for detailed description of substitutions, R-groups and preferred embodiments
  MOD_RES (9)..(9): Any L- or D-natural amino acid and any non-natural amino acid; see specification as filed for detailed description of substitutions, R-groups and preferred embodiments
  MOD_RES (11)..(12): Any L- or D-natural amino acid and any non-natural amino acid; see specification as filed for detailed description of substitutions, R-groups and preferred embodiments
  MOD_RES (18)..(21): Any L- or D-natural or non-natural amino acid, and this range may encompass 1 or 4 residues; see specification as filed for detailed description of substitutions, R-groups and preferred embodiments
  c-term may be amidated
XPLSRTVRXTXXSISNQXXXXLKAVSKEMSKRSP

SEQ ID NO: 307 - protein, 34 aa, Artificial Sequence
  Description of Artificial Sequence: Synthetic peptide
  MOD_RES (2)..(2): Any L- or D-natural amino acid and any non-natural amino acid; see specification as filed for detailed description of substitutions, R-groups and preferred embodiments
  MOD_RES (9)..(9): Any L- or D-natural amino acid and any non-natural amino acid; see specification as filed for detailed description of substitutions, R-groups and preferred embodiments
  MOD_RES (11)..(12): Any L- or D-natural amino acid and any non-natural amino acid; see specification as filed for detailed description of substitutions, R-groups and preferred embodiments
  MOD_RES (18)..(21): Any L- or D-natural or non-natural amino acid, and this range may encompass 1 or 4 residues; see specification as filed for detailed description of substitutions, R-groups and preferred embodiments
  c-term may be amidated
VXLSRTVRXTXXSISNQXXXXLKAVSKEMSKRSP

SEQ ID NO: 308 - protein, 34 aa, Artificial Sequence
  Description of Artificial Sequence: Synthetic peptide
  MOD_RES (3)..(3): Any L- or D-natural amino acid and any non-natural amino acid; see specification as filed for detailed description of substitutions, R-groups and preferred embodiments
  MOD_RES (9)..(9): Any L- or D-natural amino acid and any non-natural amino acid; see specification as filed for detailed description of substitutions, R-groups and preferred embodiments
  MOD_RES (11)..(12): Any L- or D-natural amino acid and any non-natural amino acid; see specification as filed for detailed description of substitutions, R-groups and preferred embodiments
  MOD_RES (18)..(21): Any L- or D-natural or non-natural amino acid, and this range may encompass 1 or 4 residues; see specification as filed for detailed description of substitutions, R-groups and preferred embodiments
  c-term may be amidated
VPXSRTVRXTXXSISNQXXXXLKAVSKEMSKRSP

SEQ ID NO: 309 - protein, 34 aa, Artificial Sequence
  Description of Artificial Sequence: Synthetic peptide
  MOD_RES (4)..(4): Any L- or D-natural amino acid and any non-natural amino acid; see specification as filed for detailed description of substitutions, R-groups and preferred embodiments
  MOD_RES (9)..(9): Any L- or D-natural amino acid and any non-natural amino acid; see specification as filed for detailed description of substitutions, R-groups and preferred embodiments
  MOD_RES (11)..(12): Any L- or D-natural amino acid and any non-natural amino acid; see specification as filed for detailed description of substitutions, R-groups and preferred embodiments
  MOD_RES (18)..(21): Any L- or D-natural or non-natural amino acid, and this range may encompass 1 or 4 residues; see specification as filed for detailed description of substitutions, R-groups and preferred embodiments
  c-term may be amidated
VPLXRTVRXTXXSISNQXXXXLKAVSKEMSKRSP

SEQ ID NO: 310 - protein, 34 aa, Artificial Sequence
  Description of Artificial Sequence: Synthetic peptide
  MOD_RES (5)..(5): Any L- or D-natural amino acid and any non-natural amino acid; see specification as filed for detailed description of substitutions, R-groups and preferred embodiments
  MOD_RES (9)..(9): Any L- or D-natural amino acid and any non-natural amino acid; see specification as filed for detailed description of substitutions, R-groups and preferred embodiments
  MOD_RES (11)..(12): Any L- or D-natural amino acid and any non-natural amino acid; see specification as filed for detailed description of substitutions, R-groups and preferred embodiments
  MOD_RES (18)..(21): Any L- or D-natural or non-natural amino acid, and this range may encompass 1 or 4 residues; see specification as filed for detailed description of substitutions, R-groups and preferred embodiments
  c-term may be amidated
VPLSXTVRXTXXSISNQXXXXLKAVSKEMSKRSP

SEQ ID NO: 311 - protein, 34 aa, Artificial Sequence
  Description of Artificial Sequence: Synthetic peptide
  MOD_RES (6)..(6): Any L- or D-natural amino acid and any non-natural amino acid; see specification as filed for detailed description of substitutions, R-groups and preferred embodiments
  MOD_RES (9)..(9): Any L- or D-natural amino acid and any non-natural amino acid; see specification as filed for detailed description of substitutions, R-groups and preferred embodiments
  MOD_RES (11)..(12): Any L- or D-natural amino acid and any non-natural amino acid; see specification as filed for detailed description of substitutions, R-groups and preferred embodiments
  MOD_RES (18)..(21): Any L- or D-natural or non-natural amino acid, and this range may encompass 1 or 4 residues; see specification as filed for detailed description of substitutions, R-groups and preferred embodiments
  c-term may be amidated
VPLSRXVRXTXXSISNQXXXXLKAVSKEMSKRSP

SEQ ID NO: 312 - protein, 34 aa, Artificial Sequence
  Description of Artificial Sequence: Synthetic peptide
  MOD_RES (7)..(7): Any L- or D-natural amino acid and any non-natural amino acid; see specification as filed for detailed description of substitutions, R-groups and preferred embodiments
  MOD_RES (9)..(9): Any L- or D-natural amino acid and any non-natural amino acid; see specification as filed for detailed description of substitutions, R-groups and preferred embodiments
  MOD_RES (11)..(12): Any L- or D-natural amino acid and any non-natural amino acid; see specification as filed for detailed description of substitutions, R-groups and preferred embodiments
  MOD_RES (18)..(21): Any L- or D-natural or non-natural amino acid, and this range may encompass 1 or 4 residues; see specification as filed for detailed description of substitutions, R-groups and preferred embodiments
  c-term may be amidated
VPLSRTXRXTXXSISNQXXXXLKAVSKEMSKRSP

SEQ ID NO: 313 - protein, 34 aa, Artificial Sequence
  Description of Artificial Sequence: Synthetic peptide
  MOD_RES (8)..(9): Any L- or D-natural amino acid and any non-natural amino acid; see specification as filed for detailed description of substitutions, R-groups and preferred embodiments
  MOD_RES (11)..(12): Any L- or D-natural amino acid and any non-natural amino acid; see specification as filed for detailed description of substitutions, R-groups and preferred embodiments
  MOD_RES (18)..(21): Any L- or D-natural or non-natural amino acid, and this range may encompass 1 or 4 residues; see specification as filed for detailed description of substitutions, R-groups and preferred embodiments
  c-term may be amidated
VPLSRTVXXTXXSISNQXXXXLKAVSKEMSKRSP

SEQ ID NO: 314 - protein, 34 aa, Artificial Sequence
  Description of Artificial Sequence: Synthetic peptide
  MOD_RES (13)..(13): Any L- or D-natural amino acid and any non-natural amino acid; see specification as filed for detailed description of substitutions, R-groups and preferred embodiments
  MOD_RES (18)..(21): Any L- or D-natural or non-natural amino acid, and this range may encompass 1 or 4 residues; see specification as filed for detailed description of substitutions, R-groups and preferred embodiments
  c-term may be amidated
VPLSRTVRCTCIXISNQXXXXLKAVSKEMSKRSP

SEQ ID NO: 315 - protein, 34 aa, Artificial Sequence
  Description of Artificial Sequence: Synthetic peptide
  MOD_RES (1)..(1): Any L- or D-natural amino acid and any non-natural amino acid; see specification as filed for detailed description of substitutions, R-groups and preferred embodiments
  MOD_RES (9)..(9): Any L- or D-natural amino acid and any non-natural amino acid; see specification as filed for detailed description of substitutions, R-groups and preferred embodiments
  MOD_RES (11)..(11): Any L- or D-natural amino acid and any non-natural amino acid; see specification as filed for detailed description of substitutions, R-groups and preferred embodiments
  MOD_RES (13)..(13): Any L- or D-natural amino acid and any non-natural amino acid; see specification as filed for detailed description of substitutions, R-groups and preferred embodiments
  MOD_RES (18)..(21): Any L- or D-natural or non-natural amino acid, and this range may encompass 1 or 4 residues; see specification as filed for detailed description of substitutions, R-groups and preferred embodiments
  c-term may be amidated
XPLSRTVRXTXIXISNQXXXXLKAVSKEMSKRSP

SEQ ID NO: 316 - protein, 34 aa, Artificial Sequence
  Description of Artificial Sequence: Synthetic peptide
  MOD_RES (2)..(2): Any L- or D-natural amino acid and any non-natural amino acid; see specification as filed for detailed description of substitutions, R-groups and preferred embodiments
  MOD_RES (9)..(9): Any L- or D-natural amino acid and any non-natural amino acid; see specification as filed for detailed description of substitutions, R-groups and preferred embodiments
  MOD_RES (11)..(11): Any L- or D-natural amino acid and any non-natural amino acid; see specification as filed for detailed description of substitutions, R-groups and preferred embodiments
  MOD_RES (13)..(13): Any L- or D-natural amino acid and any non-natural amino acid; see specification as filed for detailed description of substitutions, R-groups and preferred embodiments
  MOD_RES (18)..(21): Any L- or D-natural or non-natural amino acid, and this range may encompass 1 or 4 residues; see specification as filed for detailed description of substitutions, R-groups and preferred embodiments
  c-term may be amidated
VXLSRTVRXTXIXISNQXXXXLKAVSKEMSKRSP

SEQ ID NO: 317 - protein, 34 aa, Artificial Sequence
  Description of Artificial Sequence: Synthetic peptide
  MOD_RES (3)..(3): Any L- or D-natural amino acid and any non-natural amino acid; see specification as filed for detailed description of substitutions, R-groups and preferred embodiments
  MOD_RES (9)..(9): Any L- or D-natural amino acid and any non-natural amino acid; see specification as filed for detailed description of substitutions, R-groups and preferred embodiments
  MOD_RES (11)..(11): Any L- or D-natural amino acid and any non-natural amino acid; see specification as filed for detailed description of substitutions, R-groups and preferred embodiments
  MOD_RES (13)..(13): Any L- or D-natural amino acid and any non-natural amino acid; see specification as filed for detailed description of substitutions, R-groups and preferred embodiments
  MOD_RES (18)..(21): Any L- or D-natural or non-natural amino acid, and this range may encompass 1 or 4 residues; see specification as filed for detailed description of substitutions, R-groups and preferred embodiments
  c-term may be amidated
VPXSRTVRXTXIXISNQXXXXLKAVSKEMSKRSP

SEQ ID NO: 318 - protein, 34 aa, Artificial Sequence
  Description of Artificial Sequence: Synthetic peptide
  MOD_RES (4)..(4): Any L- or D-natural amino acid and any non-natural amino acid; see specification as filed for detailed description of substitutions, R-groups and preferred embodiments
  MOD_RES (9)..(9): Any L- or D-natural amino acid and any non-natural amino acid; see specification as filed for detailed description of substitutions, R-groups and preferred embodiments
  MOD_RES (11)..(11): Any L- or D-natural amino acid and any non-natural amino acid; see specification as filed for detailed description of substitutions, R-groups and preferred embodiments
  MOD_RES (13)..(13): Any L- or D-natural amino acid and any non-natural amino acid; see specification as filed for detailed description of substitutions, R-groups and preferred embodiments
  MOD_RES (18)..(21): Any L- or D-natural or non-natural amino acid, and this range may encompass 1 or 4 residues; see specification as filed for detailed description of substitutions, R-groups and preferred embodiments
  c-term may be amidated
VPLXRTVRXTXIXISNQXXXXLKAVSKEMSKRSP

SEQ ID NO: 319 - protein, 34 aa, Artificial Sequence
  Description of Artificial Sequence: Synthetic peptide
  MOD_RES (5)..(5): Any L- or D-natural amino acid and any non-natural amino acid; see specification as filed for detailed description of substitutions, R-groups and preferred embodiments
  MOD_RES (9)..(9): Any L- or D-natural amino acid and any non-natural amino acid; see specification as filed for detailed description of substitutions, R-groups and preferred embodiments
  MOD_RES (11)..(11): Any L- or D-natural amino acid and any non-natural amino acid; see specification as filed for detailed description of substitutions, R-groups and preferred embodiments
  MOD_RES (13)..(13): Any L- or D-natural amino acid and any non-natural amino acid; see specification as filed for detailed description of substitutions, R-groups and preferred embodiments
  MOD_RES (18)..(21): Any L- or D-natural or non-natural amino acid, and this range may encompass 1 or 4 residues; see specification as filed for detailed description of substitutions, R-groups and preferred embodiments
  c-term may be amidated
VPLSXTVRXTXIXISNQXXXXLKAVSKEMSKRSP

SEQ ID NO: 320 - protein, 34 aa, Artificial Sequence
  Description of Artificial Sequence: Synthetic peptide
  MOD_RES (6)..(6): Any L- or D-natural amino acid and any non-natural amino acid; see specification as filed for detailed description of substitutions, R-groups and preferred embodiments
  MOD_RES (9)..(9): Any L- or D-natural amino acid and any non-natural amino acid; see specification as filed for detailed description of substitutions, R-groups and preferred embodiments
  MOD_RES (11)..(11): Any L- or D-natural amino acid and any non-natural amino acid; see specification as filed for detailed description of substitutions, R-groups and preferred embodiments
  MOD_RES (13)..(13): Any L- or D-natural amino acid and any non-natural amino acid; see specification as filed for detailed description of substitutions, R-groups and preferred embodiments
  MOD_RES (18)..(21): Any L- or D-natural or non-natural amino acid, and this range may encompass 1 or 4 residues; see specification as filed for detailed description of substitutions, R-groups and preferred embodiments
  c-term may be amidated
VPLSRXVRXTXIXISNQXXXXLKAVSKEMSKRSP

SEQ ID NO: 321 - protein, 34 aa, Artificial Sequence
  Description of Artificial Sequence: Synthetic peptide
  MOD_RES (7)..(7): Any L- or D-natural amino acid and any non-natural amino acid; see specification as filed for detailed description of substitutions, R-groups and preferred embodiments
  MOD_RES (9)..(9): Any L- or D-natural amino acid and any non-natural amino acid; see specification as filed for detailed description of substitutions, R-groups and preferred embodiments
  MOD_RES (11)..(11): Any L- or D-natural amino acid and any non-natural amino acid; see specification as filed for detailed description of substitutions, R-groups and preferred embodiments
  MOD_RES (13)..(13): Any L- or D-natural amino acid and any non-natural amino acid; see specification as filed for detailed description of substitutions, R-groups and preferred embodiments
  MOD_RES (18)..(21): Any L- or D-natural or non-natural amino acid, and this range may encompass 1 or 4 residues; see specification as filed for detailed description of substitutions, R-groups and preferred embodiments
  c-term may be amidated
VPLSRTXRXTXIXISNQXXXXLKAVSKEMSKRSP

SEQ ID NO: 322 - protein, 34 aa, Artificial Sequence
  Description of Artificial Sequence: Synthetic peptide
  MOD_RES (8)..(9): Any L- or D-natural amino acid and any non-natural amino acid; see specification as filed for detailed description of substitutions, R-groups and preferred embodiments
  MOD_RES (11)..(11): Any L- or D-natural amino acid and any non-natural amino acid; see specification as filed for detailed description of substitutions, R-groups and preferred embodiments
  MOD_RES (13)..(13): Any L- or D-natural amino acid and any non-natural amino acid; see specification as filed for detailed description of substitutions, R-groups and preferred embodiments
  MOD_RES (18)..(21): Any L- or D-natural or non-natural amino acid, and this range may encompass 1 or 4 residues; see specification as filed for detailed description of substitutions, R-groups and preferred embodiments
  c-term may be amidated
VPLSRTVXXTXIXISNQXXXXLKAVSKEMSKRSP

SEQ ID NO: 323 - protein, 34 aa, Artificial Sequence
  Description of Artificial Sequence: Synthetic peptide
  MOD_RES (14)..(14): Any L- or D-natural amino acid and any non-natural amino acid; see specification as filed for detailed description of substitutions, R-groups and preferred embodiments
  MOD_RES (18)..(21): Any L- or D-natural or non-natural amino acid, and this range may encompass 1 or 4 residues; see specification as filed for detailed description of substitutions, R-groups and preferred embodiments
  c-term may be amidated
VPLSRTVRCTCISXSNQXXXXLKAVSKEMSKRSP

SEQ ID NO: 324 - protein, 34 aa, Artificial Sequence
  Description of Artificial Sequence: Synthetic peptide
  MOD_RES (1)..(1): Any L- or D-natural amino acid and any non-natural amino acid; see specification as filed for detailed description of substitutions, R-groups and preferred embodiments
  MOD_RES (9)..(9): Any L- or D-natural amino acid and any non-natural amino acid; see specification as filed for detailed description of substitutions, R-groups and preferred embodiments
  MOD_RES (11)..(11): Any L- or D-natural amino acid and any non-natural amino acid; see specification as filed for detailed description of substitutions, R-groups and preferred embodiments
  MOD_RES (14)..(14): Any L- or D-natural amino acid and any non-natural amino acid; see specification as filed for detailed description of substitutions, R-groups and preferred embodiments
  MOD_RES (18)..(21): Any L- or D-natural or non-natural amino acid, and this range may encompass 1 or 4 residues; see specification as filed for detailed description of substitutions, R-groups and preferred embodiments
  c-term may be amidated
XPLSRTVRXTXISXSNQXXXXLKAVSKEMSKRSP

SEQ ID NO: 325 - protein, 34 aa, Artificial Sequence
  Description of Artificial Sequence: Synthetic peptide
  MOD_RES (2)..(2): Any L- or D-natural amino acid and any non-natural amino acid; see specification as filed for detailed description of substitutions, R-groups and preferred embodiments
  MOD_RES (9)..(9): Any L- or D-natural amino acid and any non-natural amino acid; see specification as filed for detailed description of substitutions, R-groups and preferred embodiments
  MOD_RES (11)..(11): Any L- or D-natural amino acid and any non-natural amino acid; see specification as filed for detailed description of substitutions, R-groups and preferred embodiments
  MOD_RES (14)..(14): Any L- or D-natural amino acid and any non-natural amino acid; see specification as filed for detailed description of substitutions, R-groups and preferred embodiments
  MOD_RES (18)..(21): Any L- or D-natural or non-natural amino acid, and this range may encompass 1 or 4 residues; see specification as filed for detailed description of substitutions, R-groups and preferred embodiments
  c-term may be amidated
VXLSRTVRXTXISXSNQXXXXLKAVSKEMSKRSP

SEQ ID NO: 326 - protein, 34 aa, Artificial Sequence
  Description of Artificial Sequence: Synthetic peptide
  MOD_RES (3)..(3): Any L- or D-natural amino acid and any non-natural amino acid; see specification as filed for detailed description of substitutions, R-groups and preferred embodiments
  MOD_RES (9)..(9): Any L- or D-natural amino acid and any non-natural amino acid; see specification as filed for detailed description of substitutions, R-groups and preferred embodiments
  MOD_RES (11)..(11): Any L- or D-natural amino acid and any non-natural amino acid; see specification as filed for detailed description of substitutions, R-groups and preferred embodiments
  MOD_RES (14)..(14): Any L- or D-natural amino acid and any non-natural amino acid; see specification as filed for detailed description of substitutions, R-groups and preferred embodiments
  MOD_RES (18)..(21): Any L- or D-natural or non-natural amino acid, and this range may encompass 1 or 4 residues; see specification as filed for detailed description of substitutions, R-groups and preferred embodiments
  c-term may be amidated
VPXSRTVRXTXISXSNQXXXXLKAVSKEMSKRSP

SEQ ID NO: 327 - protein, 34 aa, Artificial Sequence
  Description of Artificial Sequence: Synthetic peptide
  MOD_RES (4)..(4): Any L- or D-natural amino acid and any non-natural amino acid; see specification as filed for detailed description of substitutions, R-groups and preferred embodiments
  MOD_RES (9)..(9): Any L- or D-natural amino acid and any non-natural amino acid; see specification as filed for detailed description of substitutions, R-groups and preferred embodiments
  MOD_RES (11)..(11): Any L- or D-natural amino acid and any non-natural amino acid; see specification as filed for detailed description of substitutions, R-groups and preferred embodiments
  MOD_RES (14)..(14): Any L- or D-natural amino acid and any non-natural amino acid; see specification as filed for detailed description of substitutions, R-groups and preferred embodiments
  MOD_RES (18)..(21): Any L- or D-natural or non-natural amino acid, and this range may encompass 1 or 4 residues; see specification as filed for detailed description of substitutions, R-groups and preferred embodiments
  c-term may be amidated
VPLXRTVRXTXISXSNQXXXXLKAVSKEMSKRSP

SEQ ID NO: 328 - protein, 34 aa, Artificial Sequence
  Description of Artificial Sequence: Synthetic peptide
  MOD_RES (5)..(5): Any L- or D-natural amino acid and any non-natural amino acid; see specification as filed for detailed description of substitutions, R-groups and preferred embodiments
  MOD_RES (9)..(9): Any L- or D-natural amino acid and any non-natural amino acid; see specification as filed for detailed description of substitutions, R-groups and preferred embodiments
  MOD_RES (11)..(11): Any L- or D-natural amino acid and any non-natural amino acid; see specification as filed for detailed description of substitutions, R-groups and preferred embodiments
  MOD_RES (14)..(14): Any L- or D-natural amino acid and any non-natural amino acid; see specification as filed for detailed description of substitutions, R-groups and preferred embodiments
  MOD_RES (18)..(21): Any L- or D-natural or non-natural amino acid, and this range may encompass 1 or 4 residues; see specification as filed for detailed description of substitutions, R-groups and preferred embodiments
  c-term may be amidated
VPLSXTVRXTXISXSNQXXXXLKAVSKEMSKRSP

SEQ ID NO: 329 - protein, 34 aa, Artificial Sequence
  Description of Artificial Sequence: Synthetic peptide
  MOD_RES (6)..(6): Any L- or D-natural amino acid and any non-natural amino acid; see specification as filed for detailed description of substitutions, R-groups and preferred embodiments
  MOD_RES (9)..(9): Any L- or D-natural amino acid and any non-natural amino acid; see specification as filed for detailed description of substitutions, R-groups and preferred embodiments
  MOD_RES (11)..(11): Any L- or D-natural amino acid and any non-natural amino acid; see specification as filed for detailed description of substitutions, R-groups and preferred embodiments
  MOD_RES (14)..(14): Any L- or D-natural amino acid and any non-natural amino acid; see specification as filed for detailed description of substitutions, R-groups and preferred embodiments
  MOD_RES (18)..(21): Any L- or D-natural or non-natural amino acid, and this range may encompass 1 or 4 residues; see specification as filed for detailed description of substitutions, R-groups and preferred embodiments
  c-term may be amidated
VPLSRXVRXTXISXSNQXXXXLKAVSKEMSKRSP

SEQ ID NO: 330 - protein, 34 aa, Artificial Sequence
  Description of Artificial Sequence: Synthetic peptide
  MOD_RES (7)..(7): Any L- or D-natural amino acid and any non-natural amino acid; see specification as filed for detailed description of substitutions, R-groups and preferred embodiments
  MOD_RES (9)..(9): Any L- or D-natural amino acid and any non-natural amino acid; see specification as filed for detailed description of substitutions, R-groups and preferred embodiments
  MOD_RES (11)..(11): Any L- or D-natural amino acid and any non-natural amino acid; see specification as filed for detailed description of substitutions, R-groups and preferred embodiments
  MOD_RES (14)..(14): Any L- or D-natural amino acid and any non-natural amino acid; see specification as filed for detailed description of substitutions, R-groups and preferred embodiments
  MOD_RES (18)..(21): Any L- or D-natural or non-natural amino acid, and this range may encompass 1 or 4 residues; see specification as filed for detailed description of substitutions, R-groups and preferred embodiments
  c-term may be amidated
VPLSRTXRXTXISXSNQXXXXLKAVSKEMSKRSP

SEQ ID NO: 331 - protein, 34 aa, Artificial Sequence
  Description of Artificial Sequence: Synthetic peptide
  MOD_RES (8)..(9): Any L- or D-natural amino acid and any non-natural amino acid; see specification as filed for detailed description of substitutions, R-groups and preferred embodiments
  MOD_RES (11)..(11): Any L- or D-natural amino acid and any non-natural amino acid; see specification as filed for detailed description of substitutions, R-groups and preferred embodiments
  MOD_RES (14)..(14): Any L- or D-natural amino acid and any non-natural amino acid; see specification as filed for detailed description of substitutions, R-groups and preferred embodiments
  MOD_RES (18)..(21): Any L- or D-natural or non-natural amino acid, and this range may encompass 1 or 4 residues; see specification as filed for detailed description of substitutions, R-groups and preferred embodiments
  c-term may be amidated
VPLSRTVXXTXISXSNQXXXXLKAVSKEMSKRSP

SEQ ID NO: 332 - protein, 34 aa, Artificial Sequence
  Description of Artificial Sequence: Synthetic peptide
  MOD_RES (16)..(16): Any L- or D-natural amino acid and any non-natural amino acid; see specification as filed for detailed description of substitutions, R-groups and preferred embodiments
  MOD_RES (18)..(21): Any L- or D-natural or non-natural amino acid, and this range may encompass 1 or 4 residues; see specification as filed for detailed description of substitutions, R-groups and preferred embodiments
  c-term may be amidated
VPLSRTVRCTCISISXQXXXXLKAVSKEMSKRSP

SEQ ID NO: 333 - protein, 34 aa, Artificial Sequence
  Description of Artificial Sequence: Synthetic peptide
  MOD_RES (1)..(1): Any L- or D-natural amino acid and any non-natural amino acid; see specification as filed for detailed description of substitutions, R-groups and preferred embodiments
  MOD_RES (9)..(9): Any L- or D-natural amino acid and any non-natural amino acid; see specification as filed for detailed description of substitutions, R-groups and preferred embodiments
  MOD_RES (11)..(11): Any L- or D-natural amino acid and any non-natural amino acid; see specification as filed for detailed description of substitutions, R-groups and preferred embodiments
  MOD_RES (16)..(16): Any L- or D-natural amino acid and any non-natural amino acid; see specification as filed for detailed description of substitutions, R-groups and preferred embodiments
  MOD_RES (18)..(21): Any L- or D-natural or non-natural amino acid, and this range may encompass 1 or 4 residues; see specification as filed for detailed description of substitutions, R-groups and preferred embodiments
  c-term may be amidated
XPLSRTVRXTXISISXQXXXXLKAVSKEMSKRSP

SEQ ID NO: 334 - protein, 34 aa, Artificial Sequence
  Description of Artificial Sequence: Synthetic peptide
  MOD_RES (2)..(2): Any L- or D-natural amino acid and any non-natural amino acid; see specification as filed for detailed description of substitutions, R-groups and preferred embodiments
  MOD_RES (9)..(9): Any L- or D-natural amino acid and any non-natural amino acid; see specification as filed for detailed description of substitutions, R-groups and preferred embodiments
  MOD_RES (11)..(11): Any L- or D-natural amino acid and any non-natural amino acid; see specification as filed for detailed description of substitutions, R-groups and preferred embodiments
  MOD_RES (16)..(16): Any L- or D-natural amino acid and any non-natural amino acid; see specification as filed for detailed description of substitutions, R-groups and preferred embodiments
  MOD_RES (18)..(21): Any L- or D-natural or non-natural amino acid, and this range may encompass 1 or 4 residues; see specification as filed for detailed description of substitutions, R-groups and preferred embodiments
  c-term may be amidated
VXLSRTVRXTXISISXQXXXXLKAVSKEMSKRSP

SEQ ID NO: 335 - protein, 34 aa, Artificial Sequence
  Description of Artificial Sequence: Synthetic peptide
  MOD_RES (3)..(3): Any L- or D-natural amino acid and any non-natural amino acid; see specification as filed for detailed description of substitutions, R-groups and preferred embodiments
  MOD_RES (9)..(9): Any L- or D-natural amino acid and any non-natural amino acid; see specification as filed for detailed description of substitutions, R-groups and preferred embodiments
  MOD_RES (11)..(11): Any L- or D-natural amino acid and any non-natural amino acid; see specification as filed for detailed description of substitutions, R-groups and preferred embodiments
  MOD_RES (16)..(16): Any L- or D-natural amino acid and any non-natural amino acid; see specification as filed for detailed description of substitutions, R-groups and preferred embodiments
  MOD_RES (18)..(21): Any L- or D-natural or non-natural amino acid, and this range may encompass 1 or 4 residues; see specification as filed for detailed description of substitutions, R-groups and preferred embodiments
  c-term may be amidated
VPXSRTVRXTXISISXQXXXXLKAVSKEMSKRSP

SEQ ID NO: 336 - protein, 34 aa, Artificial Sequence
  Description of Artificial Sequence: Synthetic peptide
  MOD_RES (4)..(4): Any L- or D-natural amino acid and any non-natural amino acid; see specification as filed for detailed description of substitutions, R-groups and preferred embodiments
  MOD_RES (9)..(9): Any L- or D-natural amino acid and any non-natural amino acid; see specification as filed for detailed description of substitutions, R-groups and preferred embodiments
  MOD_RES (11)..(11): Any L- or D-natural amino acid and any non-natural amino acid; see specification as filed for detailed description of substitutions, R-groups and preferred embodiments
  MOD_RES (16)..(16): Any L- or D-natural amino acid and any non-natural amino acid; see specification as filed for detailed description of substitutions, R-groups and preferred embodiments
  MOD_RES (18)..(21): Any L- or D-natural or non-natural amino acid, and this range may encompass 1 or 4 residues; see specification as filed for detailed description of substitutions, R-groups and preferred embodiments
  c-term may be amidated
VPLXRTVRXTXISISXQXXXXLKAVSKEMSKRSP

SEQ ID NO: 337 - protein, 34 aa, Artificial Sequence
  Description of Artificial Sequence: Synthetic peptide
  MOD_RES (5)..(5): Any L- or D-natural amino acid and any non-natural amino acid; see specification as filed for detailed description of substitutions, R-groups and preferred embodiments
  MOD_RES (9)..(9): Any L- or D-natural amino acid and any non-natural amino acid; see specification as filed for detailed description of substitutions, R-groups and preferred embodiments
  MOD_RES (11)..(11): Any L- or D-natural amino acid and any non-natural amino acid; see specification as filed for detailed description of substitutions, R-groups and preferred embodiments
  MOD_RES (16)..(16): Any L- or D-natural amino acid and any non-natural amino acid; see specification as filed for detailed description of substitutions, R-groups and preferred embodiments
  MOD_RES (18)..(21): Any L- or D-natural or non-natural amino acid, and this range may encompass 1 or 4 residues; see specification as filed for detailed description of substitutions, R-groups and preferred embodiments
  c-term may be amidated
VPLSXTVRXTXISISXQXXXXLKAVSKEMSKRSP

SEQ ID NO: 338 - protein, 34 aa, Artificial Sequence
  Description of Artificial Sequence: Synthetic peptide
  MOD_RES (6)..(6): Any L- or D-natural amino acid and any non-natural amino acid; see specification as filed for detailed description of substitutions, R-groups and preferred embodiments
  MOD_RES (9)..(9): Any L- or D-natural amino acid and any non-natural amino acid; see specification as filed for detailed description of substitutions, R-groups and preferred embodiments
  MOD_RES (11)..(11): Any L- or D-natural amino acid and any non-natural amino acid; see specification as filed for detailed description of substitutions, R-groups and preferred embodiments
  MOD_RES (16)..(16): Any L- or D-natural amino acid and any non-natural amino acid; see specification as filed for detailed description of substitutions, R-groups and preferred embodiments
  MOD_RES (18)..(21): Any L- or D-natural or non-natural amino acid, and this range may encompass 1 or 4 residues; see specification as filed for detailed description of substitutions, R-groups and preferred embodiments
  c-term may be amidated
VPLSRXVRXTXISISXQXXXXLKAVSKEMSKRSP

SEQ ID NO: 339 - protein, 34 aa, Artificial Sequence
  Description of Artificial Sequence: Synthetic peptide
  MOD_RES (7)..(7): Any L- or D-natural amino acid and any non-natural amino acid; see specification as filed for detailed description of substitutions, R-groups and preferred embodiments
  MOD_RES (9)..(9): Any L- or D-natural amino acid and any non-natural amino acid; see specification as filed for detailed description of substitutions, R-groups and preferred embodiments
  MOD_RES (11)..(11): Any L- or D-natural amino acid and any non-natural amino acid; see specification as filed for detailed description of substitutions, R-groups and preferred embodiments
  MOD_RES (16)..(16): Any L- or D-natural amino acid and any non-natural amino acid; see specification as filed for detailed description of substitutions, R-groups and preferred embodiments
  MOD_RES (18)..(21): Any L- or D-natural or non-natural amino acid, and this range may encompass 1 or 4 residues; see specification as filed for detailed description of substitutions, R-groups and preferred embodiments
  c-term may be amidated
VPLSRTXRXTXISISXQXXXXLKAVSKEMSKRSP

SEQ ID NO: 340 - protein, 34 aa, Artificial Sequence
  Description of Artificial Sequence: Synthetic peptide
  MOD_RES (8)..(9): Any L- or D-natural amino acid and any non-natural amino acid; see specification as filed for detailed description of substitutions, R-groups and preferred embodiments
  MOD_RES (11)..(11): Any L- or D-natural amino acid and any non-natural amino acid; see specification as filed for detailed description of substitutions, R-groups and preferred embodiments
  MOD_RES (16)..(16): Any L- or D-natural amino acid and any non-natural amino acid; see specification as filed for detailed description of substitutions, R-groups and preferred embodiments
  MOD_RES (18)..(21): Any L- or D-natural or non-natural amino acid, and this range may encompass 1 or 4 residues; see specification as filed for detailed description of substitutions, R-groups and preferred embodiments
  c-term may be amidated
VPLSRTVXXTXISISXQXXXXLKAVSKEMSKRSP

SEQ ID NO: 341 - protein, 34 aa, Artificial Sequence
  Description of Artificial Sequence: Synthetic peptide
  MOD_RES (17)..(17): Any L- or D-natural amino acid and any non-natural amino acid; see specification as filed for detailed description of substitutions, R-groups and preferred embodiments
  MOD_RES (18)..(21): Any L- or D-natural or non-natural amino acid, and this range may encompass 1 or 4 residues; see specification as filed for detailed description of substitutions, R-groups and preferred embodiments
  c-term may be amidated
VPLSRTVRCTCISISQXXXXXLKAVSKEMSKRSP

SEQ ID NO: 342 - protein, 34 aa, Artificial Sequence
  Description of Artificial Sequence: Synthetic peptide
  MOD_RES (1)..(1): Any L- or D-natural amino acid and any non-natural amino acid; see specification as filed for detailed description of substitutions, R-groups and preferred embodiments
  MOD_RES (9)..(9): Any L- or D-natural amino acid and any non-natural amino acid; see specification as filed for detailed description of substitutions, R-groups and preferred embodiments
  MOD_RES (11)..(11): Any L- or D-natural amino acid and any non-natural amino acid; see specification as filed for detailed description of substitutions, R-groups and preferred embodiments
  MOD_RES (17)..(17): Any L- or D-natural amino acid and any non-natural amino acid; see specification as filed for detailed description of substitutions, R-groups and preferred embodiments
  MOD_RES (18)..(21): Any L- or D-natural or non-natural amino acid, and this range may encompass 1 or 4 residues; see specification as filed for detailed description of substitutions, R-groups and preferred embodiments
  c-term may be amidated
XPLSRTVRXTXISISQXXXXXLKAVSKEMSKRSP

SEQ ID NO: 343 - protein, 34 aa, Artificial Sequence
  Description of Artificial Sequence: Synthetic peptide
  MOD_RES (2)..(2): Any L- or D-natural amino acid and any non-natural amino acid; see specification as filed for detailed description of substitutions, R-groups and preferred embodiments
  MOD_RES (9)..(9): Any L- or D-natural amino acid and any non-natural amino acid; see specification as filed for detailed description of substitutions, R-groups and preferred embodiments
  MOD_RES (11)..(11): Any L- or D-natural amino acid and any non-natural amino acid; see specification as filed for detailed description of substitutions, R-groups and preferred embodiments
  MOD_RES (17)..(17): Any L- or D-natural amino acid and any non-natural amino acid; see specification as filed for detailed description of substitutions, R-groups and preferred embodiments
  MOD_RES (18)..(21): Any L- or D-natural or non-natural amino acid, and this range may encompass 1 or 4 residues; see specification as filed for detailed description of substitutions, R-groups and preferred embodiments
  c-term may be amidated
VXLSRTVRXTXISISQXXXXXLKAVSKEMSKRSP

SEQ ID NO: 344 - protein, 34 aa, Artificial Sequence
  Description of Artificial Sequence: Synthetic peptide
  MOD_RES (3)..(3): Any L- or D-natural amino acid and any non-natural amino acid; see specification as filed for detailed description of substitutions, R-groups and preferred embodiments
  MOD_RES (9)..(9): Any L- or D-natural amino acid and any non-natural amino acid; see specification as filed for detailed description of substitutions, R-groups and preferred embodiments
  MOD_RES (11)..(11): Any L- or D-natural amino acid and any non-natural amino acid; see specification as filed for detailed description of substitutions, R-groups and preferred embodiments
  MOD_RES (17)..(17): Any L- or D-natural amino acid and any non-natural amino acid; see specification as filed for detailed description of substitutions, R-groups and preferred embodiments
  MOD_RES (18)..(21): Any L- or D-natural or non-natural amino acid, and this range may encompass 1 or 4 residues; see specification as filed for detailed description of substitutions, R-groups and preferred embodiments
  c-term may be amidated
VPXSRTVRXTXISISQXXXXXLKAVSKEMSKRSP

SEQ ID NO: 345 - protein, 34 aa, Artificial Sequence
  Description of Artificial Sequence: Synthetic peptide
  MOD_RES (4)..(4): Any L- or D-natural amino acid and any non-natural amino acid; see specification as filed for detailed description of substitutions, R-groups and preferred embodiments
  MOD_RES (9)..(9): Any L- or D-natural amino acid and any non-natural amino acid; see specification as filed for detailed description of substitutions, R-groups and preferred embodiments
  MOD_RES (11)..(11): Any L- or D-natural amino acid and any non-natural amino acid; see specification as filed for detailed description of substitutions, R-groups and preferred embodiments
  MOD_RES (17)..(17): Any L- or D-natural amino acid and any non-natural amino acid; see specification as filed for detailed description of substitutions, R-groups and preferred embodiments
  MOD_RES (18)..(21): Any L- or D-natural or non-natural amino acid, and this range may encompass 1 or 4 residues; see specification as filed for detailed description of substitutions, R-groups and preferred embodiments
  c-term may be amidated
VPLXRTVRXTXISISQXXXXXLKAVSKEMSKRSP

SEQ ID NO: 346 - protein, 34 aa, Artificial Sequence
  Description of Artificial Sequence: Synthetic peptide
  MOD_RES (5)..(5): Any L- or D-natural amino acid and any non-natural amino acid; see specification as filed for detailed description of substitutions, R-groups and preferred embodiments
  MOD_RES (9)..(9): Any L- or D-natural amino acid and any non-natural amino acid; see specification as filed for detailed description of substitutions, R-groups and preferred embodiments
  MOD_RES (11)..(11): Any L- or D-natural amino acid and any non-natural amino acid; see specification as filed for detailed description of substitutions, R-groups and preferred embodiments
  MOD_RES (17)..(17): Any L- or D-natural amino acid and any non-natural amino acid; see specification as filed for detailed description of substitutions, R-groups and preferred embodiments
  MOD_RES (18)..(21): Any L- or D-natural or non-natural amino acid, and this range may encompass 1 or 4 residues; see specification as filed for detailed description of substitutions, R-groups and preferred embodiments
  c-term may be amidated
VPLSXTVRXTXISISQXXXXXLKAVSKEMSKRSP

SEQ ID NO: 347 - protein, 34 aa, Artificial Sequence
  Description of Artificial Sequence: Synthetic peptide
  MOD_RES (6)..(6): Any L- or D-natural amino acid and any non-natural amino acid; see specification as filed for detailed description of substitutions, R-groups and preferred embodiments
  MOD_RES (9)..(9): Any L- or D-natural amino acid and any non-natural amino acid; see specification as filed for detailed description of substitutions, R-groups and preferred embodiments
  MOD_RES (11)..(11): Any L- or D-natural amino acid and any non-natural amino acid; see specification as filed for detailed description of substitutions, R-groups and preferred embodiments
  MOD_RES (17)..(17): Any L- or D-natural amino acid and any non-natural amino acid; see specification as filed for detailed description of substitutions, R-groups and preferred embodiments
  MOD_RES (18)..(21): Any L- or D-natural or non-natural amino acid, and this range may encompass 1 or 4 residues; see specification as filed for detailed description of substitutions, R-groups and preferred embodiments
  c-term may be amidated
VPLSRXVRXTXISISQXXXXXLKAVSKEMSKRSP

SEQ ID NO: 348 - protein, 34 aa, Artificial Sequence
  Description of Artificial Sequence: Synthetic peptide
  MOD_RES (7)..(7): Any L- or D-natural amino acid and any non-natural amino acid; see specification as filed for detailed description of substitutions, R-groups and preferred embodiments
  MOD_RES (9)..(9): Any L- or D-natural amino acid and any non-natural amino acid; see specification as filed for detailed description of substitutions, R-groups and preferred embodiments
  MOD_RES (11)..(11): Any L- or D-natural amino acid and any non-natural amino acid; see specification as filed for detailed description of substitutions, R-groups and preferred embodiments
  MOD_RES (17)..(17): Any L- or D-natural amino acid and any non-natural amino acid; see specification as filed for detailed description of substitutions, R-groups and preferred embodiments
  MOD_RES (18)..(21): Any L- or D-natural or non-natural amino acid, and this range may encompass 1 or 4 residues; see specification as filed for detailed description of substitutions, R-groups and preferred embodiments
  c-term may be amidated
VPLSRTXRXTXISISQXXXXXLKAVSKEMSKRSP

SEQ ID NO: 349 - protein, 34 aa, Artificial Sequence
  Description of Artificial Sequence: Synthetic peptide
  MOD_RES (8)..(9): Any L- or D-natural amino acid and any non-natural amino acid; see specification as filed for detailed description of substitutions, R-groups and preferred embodiments
  MOD_RES (11)..(11): Any L- or D-natural amino acid and any non-natural amino acid; see specification as filed for detailed description of substitutions, R-groups and preferred embodiments
  MOD_RES (17)..(17): Any L- or D-natural amino acid and any non-natural amino acid; see specification as filed for detailed description of substitutions, R-groups and preferred embodiments
  MOD_RES (18)..(21): Any L- or D-natural or non-natural amino acid, and this range may encompass 1 or 4 residues; see specification as filed for detailed description of substitutions, R-groups and preferred embodiments
  c-term may be amidated
VPLSRTVXXTXISISQXXXXXLKAVSKEMSKRSP

SEQ ID NO: 350 - protein, 34 aa, Artificial Sequence
  Description of Artificial Sequence: Synthetic peptide
  MOD_RES (18)..(21): Any L- or D-natural or non-natural amino acid, and this range may encompass 1 or 4 residues; see specification as filed for detailed description of substitutions, R-groups and preferred embodiments
  c-term may be amidated
VPLSRTVRCTCISISNQXXXXLNPESKAIKNLLK

SEQ ID NO: 351 - protein, 34 aa, Artificial Sequence
  Description of Artificial Sequence: Synthetic peptide
  MOD_RES (1)..(1): Any L- or D-natural amino acid and any non-natural amino acid; see specification as filed for detailed description of substitutions, R-groups and preferred embodiments
  MOD_RES (9)..(9): Any L- or D-natural amino acid and any non-natural amino acid; see specification as filed for detailed description of substitutions, R-groups and preferred embodiments
  MOD_RES (11)..(11): Any L- or D-natural amino acid and any non-natural amino acid; see specification as filed for detailed description of substitutions, R-groups and preferred embodiments
  MOD_RES (18)..(21): Any L- or D-natural or non-natural amino acid, and this range may encompass 1 or 4 residues; see specification as filed for detailed description of substitutions, R-groups and preferred embodiments
  c-term may be amidated
XPLSRTVRXTXISISNQXXXXLNPESKAIKNLLK

SEQ ID NO: 352 - protein, 34 aa, Artificial Sequence
  Description of Artificial Sequence: Synthetic peptide
  MOD_RES (2)..(2): Any L- or D-natural amino acid and any non-natural amino acid; see specification as filed for detailed description of substitutions, R-groups and preferred embodiments
  MOD_RES (9)..(9): Any L- or D-natural amino acid and any non-natural amino acid; see specification as filed for detailed description of substitutions, R-groups and preferred embodiments
  MOD_RES (11)..(11): Any L- or D-natural amino acid and any non-natural amino acid; see specification as filed for detailed description of substitutions, R-groups and preferred embodiments
  MOD_RES (18)..(21): Any L- or D-natural or non-natural amino acid, and this range may encompass 1 or 4 residues; see specification as filed for detailed description of substitutions, R-groups and preferred embodiments
  c-term may be amidated
VXLSRTVRXTXISISNQXXXXLNPESKAIKNLLK

SEQ ID NO: 353 - protein, 34 aa, Artificial Sequence
  Description of Artificial Sequence: Synthetic peptide
  MOD_RES (3)..(3): Any L- or D-natural amino acid and any non-natural amino acid; see specification as filed for detailed description of substitutions, R-groups and preferred embodiments
  MOD_RES (9)..(9): Any L- or D-natural amino acid and any non-natural amino acid; see specification as filed for detailed description of substitutions, R-groups and preferred embodiments
  MOD_RES (11)..(11): Any L- or D-natural amino acid and any non-natural amino acid; see specification as filed for detailed description of substitutions, R-groups and preferred embodiments
  MOD_RES (18)..(21): Any L- or D-natural or non-natural amino acid, and this range may encompass 1 or 4 residues; see specification as filed for detailed description of substitutions, R-groups and preferred embodiments
  c-term may be amidated
VPXSRTVRXTXISISNQXXXXLNPESKAIKNLLK

SEQ ID NO: 354 - protein, 34 aa, Artificial Sequence
  Description of Artificial Sequence: Synthetic peptide
  MOD_RES (4)..(4): Any L- or D-natural amino acid and any non-natural amino acid; see specification as filed for detailed description of substitutions, R-groups and preferred embodiments
  MOD_RES (9)..(9): Any L- or D-natural amino acid and any non-natural amino acid; see specification as filed for detailed description of substitutions, R-groups and preferred embodiments
  MOD_RES (11)..(11): Any L- or D-natural amino acid and any non-natural amino acid; see specification as filed for detailed description of substitutions, R-groups and preferred embodiments
  MOD_RES (18)..(21): Any L- or D-natural or non-natural amino acid, and this range may encompass 1 or 4 residues; see specification as filed for detailed description of substitutions, R-groups and preferred embodiments
  c-term may be amidated
VPLXRTVRXTXISISNQXXXXLNPESKAIKNLLK

SEQ ID NO: 355 - protein, 34 aa, Artificial Sequence
  Description of Artificial Sequence: Synthetic peptide
  MOD_RES (5)..(5): Any L- or D-natural amino acid and any non-natural amino acid; see specification as filed for detailed description of substitutions, R-groups and preferred embodiments
  MOD_RES (9)..(9): Any L- or D-natural amino acid and any non-natural amino acid; see specification as filed for detailed description of substitutions, R-groups and preferred embodiments
  MOD_RES (11)..(11): Any L- or D-natural amino acid and any non-natural amino acid; see specification as filed for detailed description of substitutions, R-groups and preferred embodiments
  MOD_RES (18)..(21): Any L- or D-natural or non-natural amino acid, and this range may encompass 1 or 4 residues; see specification as filed for detailed description of substitutions, R-groups and preferred embodiments
  c-term may be amidated
VPLSXTVRXTXISISNQXXXXLNPESKAIKNLLK

SEQ ID NO: 356 - protein, 34 aa, Artificial Sequence
  Description of Artificial Sequence: Synthetic peptide
  MOD_RES (6)..(6): Any L- or D-natural amino acid and any non-natural amino acid; see specification as filed for detailed description of substitutions, R-groups and preferred embodiments
  MOD_RES (9)..(9): Any L- or D-natural amino acid and any non-natural amino acid; see specification as filed for detailed description of substitutions, R-groups and preferred embodiments
  MOD_RES (11)..(11): Any L- or D-natural amino acid and any non-natural amino acid; see specification as filed for detailed description of substitutions, R-groups and preferred embodiments
  MOD_RES (18)..(21): Any L- or D-natural or non-natural amino acid, and this range may encompass 1 or 4 residues; see specification as filed for detailed description of substitutions, R-groups and preferred embodiments
  c-term may be amidated
VPLSRXVRXTXISISNQXXXXLNPESKAIKNLLK

SEQ ID NO: 357 - protein, 34 aa, Artificial Sequence
  Description of Artificial Sequence: Synthetic peptide
  MOD_RES (7)..(7): Any L- or D-natural amino acid and any non-natural amino acid; see specification as filed for detailed description of substitutions, R-groups and preferred embodiments
  MOD_RES (9)..(9): Any L- or D-natural amino acid and any non-natural amino acid; see specification as filed for detailed description of substitutions, R-groups and preferred embodiments
  MOD_RES (11)..(11): Any L- or D-natural amino acid and any non-natural amino acid; see specification as filed for detailed description of substitutions, R-groups and preferred embodiments
  MOD_RES (18)..(21): Any L- or D-natural or non-natural amino acid, and this range may encompass 1 or 4 residues; see specification as filed for detailed description of substitutions, R-groups and preferred embodiments
  c-term may be amidated
VPLSRTXRXTXISISNQXXXXLNPESKAIKNLLK

SEQ ID NO: 358 - protein, 34 aa, Artificial Sequence
  Description of Artificial Sequence: Synthetic peptide
  MOD_RES (8)..(9): Any L- or D-natural amino acid and any non-natural amino acid; see specification as filed for detailed description of substitutions, R-groups and preferred embodiments
  MOD_RES (11)..(11): Any L- or D-natural amino acid and any non-natural amino acid; see specification as filed for detailed description of substitutions, R-groups and preferred embodiments
  MOD_RES (18)..(21): Any L- or D-natural or non-natural amino acid, and this range may encompass 1 or 4 residues; see specification as filed for detailed description of substitutions, R-groups and preferred embodiments
  c-term may be amidated
VPLSRTVXXTXISISNQXXXXLNPESKAIKNLLK

SEQ ID NO: 359 - protein, 34 aa, Artificial Sequence
  Description of Artificial Sequence: Synthetic peptide
  MOD_RES (12)..(12): Any L- or D-natural amino acid and any non-natural amino acid; see specification as filed for detailed description of substitutions, R-groups and preferred embodiments
  MOD_RES (18)..(21): Any L- or D-natural or non-natural amino acid, and this range may encompass 1 or 4 residues; see specification as filed for detailed description of substitutions, R-groups and preferred embodiments
  c-term may be amidated
VPLSRTVRCTCXSISNQXXXXLNPESKAIKNLLK

SEQ ID NO: 360 - protein, 34 aa, Artificial Sequence
  Description of Artificial Sequence: Synthetic peptide
  MOD_RES (1)..(1): Any L- or D-natural amino acid and any non-natural amino acid; see specification as filed for detailed description of substitutions, R-groups and preferred embodiments
  MOD_RES (9)..(9): Any L- or D-natural amino acid and any non-natural amino acid; see specification as filed for detailed description of substitutions, R-groups and preferred embodiments
  MOD_RES (11)..(12): Any L- or D-natural amino acid and any non-natural amino acid; see specification as filed for detailed description of substitutions, R-groups and preferred embodiments
  MOD_RES (18)..(21): Any L- or D-natural or non-natural amino acid, and this range may encompass 1 or 4 residues; see specification as filed for detailed description of substitutions, R-groups and preferred embodiments
  c-term may be amidated
XPLSRTVRXTXXSISNQXXXXLNPESKAIKNLLK

SEQ ID NO: 361 - protein, 34 aa, Artificial Sequence
  Description of Artificial Sequence: Synthetic peptide
  MOD_RES (2)..(2): Any L- or D-natural amino acid and any non-natural amino acid; see specification as filed for detailed description of substitutions, R-groups and preferred embodiments
  MOD_RES (9)..(9): Any L- or D-natural amino acid and any non-natural amino acid; see specification as filed for detailed description of substitutions, R-groups and preferred embodiments
  MOD_RES (11)..(12): Any L- or D-natural amino acid and any non-natural amino acid; see specification as filed for detailed description of substitutions, R-groups and preferred embodiments
  MOD_RES (18)..(21): Any L- or D-natural or non-natural amino acid, and this range may encompass 1 or 4 residues; see specification as filed for detailed description of substitutions, R-groups and preferred embodiments
  c-term may be amidated
VXLSRTVRXTXXSISNQXXXXLNPESKAIKNLLK

SEQ ID NO: 362 - protein, 34 aa, Artificial Sequence
  Description of Artificial Sequence: Synthetic peptide
  MOD_RES (3)..(3): Any L- or D-natural amino acid and any non-natural amino acid; see specification as filed for detailed description of substitutions, R-groups and preferred embodiments
  MOD_RES (9)..(9): Any L- or D-natural amino acid and any non-natural amino acid; see specification as filed for detailed description of substitutions, R-groups and preferred embodiments
  MOD_RES (11)..(12): Any L- or D-natural amino acid and any non-natural amino acid; see specification as filed for detailed description of substitutions, R-groups and preferred embodiments
  MOD_RES (18)..(21): Any L- or D-natural or non-natural amino acid, and this range may encompass 1 or 4 residues; see specification as filed for detailed description of substitutions, R-groups and preferred embodiments
  c-term may be amidated
VPXSRTVRXTXXSISNQXXXXLNPESKAIKNLLK

SEQ ID NO: 363 - protein, 34 aa, Artificial Sequence
  Description of Artificial Sequence: Synthetic peptide
  MOD_RES (4)..(4): Any L- or D-natural amino acid and any non-natural amino acid; see specification as filed for detailed description of substitutions, R-groups and preferred embodiments
  MOD_RES (9)..(9): Any L- or D-natural amino acid and any non-natural amino acid; see specification as filed for detailed description of substitutions, R-groups and preferred embodiments
  MOD_RES (11)..(12): Any L- or D-natural amino acid and any non-natural amino acid; see specification as filed for detailed description of substitutions, R-groups and preferred embodiments
  MOD_RES (18)..(21): Any L- or D-natural or non-natural amino acid, and this range may encompass 1 or 4 residues; see specification as filed for detailed description of substitutions, R-groups and preferred embodiments
  c-term may be amidated
VPLXRTVRXTXXSISNQXXXXLNPESKAIKNLLK

SEQ ID NO: 364 - protein, 34 aa, Artificial Sequence
  Description of Artificial Sequence: Synthetic peptide
  MOD_RES (5)..(5): Any L- or D-natural amino acid and any non-natural amino acid; see specification as filed for detailed description of substitutions, R-groups and preferred embodiments
  MOD_RES (9)..(9): Any L- or D-natural amino acid and any non-natural amino acid; see specification as filed for detailed description of substitutions, R-groups and preferred embodiments
  MOD_RES (11)..(12): Any L- or D-natural amino acid and any non-natural amino acid; see specification as filed for detailed description of substitutions, R-groups and preferred embodiments
  MOD_RES (18)..(21): Any L- or D-natural or non-natural amino acid, and this range may encompass 1 or 4 residues; see specification as filed for detailed description of substitutions, R-groups and preferred embodiments
  c-term may be amidated
VPLSXTVRXTXXSISNQXXXXLNPESKAIKNLLK

SEQ ID NO: 365 - protein, 34 aa, Artificial Sequence
  Description of Artificial Sequence: Synthetic peptide
  MOD_RES (6)..(6): Any L- or D-natural amino acid and any non-natural amino acid; see specification as filed for detailed description of substitutions, R-groups and preferred embodiments
  MOD_RES (9)..(9): Any L- or D-natural amino acid and any non-natural amino acid; see specification as filed for detailed description of substitutions, R-groups and preferred embodiments
  MOD_RES (11)..(12): Any L- or D-natural amino acid and any non-natural amino acid; see specification as filed for detailed description of substitutions, R-groups and preferred embodiments
  MOD_RES (18)..(21): Any L- or D-natural or non-natural amino acid, and this range may encompass 1 or 4 residues; see specification as filed for detailed description of substitutions, R-groups and preferred embodiments
  c-term may be amidated
VPLSRXVRXTXXSISNQXXXXLNPESKAIKNLLK

SEQ ID NO: 366 - protein, 34 aa, Artificial Sequence
  Description of Artificial Sequence: Synthetic peptide
  MOD_RES (7)..(7): Any L- or D-natural amino acid and any non-natural amino acid; see specification as filed for detailed description of substitutions, R-groups and preferred embodiments
  MOD_RES (9)..(9): Any L- or D-natural amino acid and any non-natural amino acid; see specification as filed for detailed description of substitutions, R-groups and preferred embodiments
  MOD_RES (11)..(12): Any L- or D-natural amino acid and any non-natural amino acid; see specification as filed for detailed description of substitutions, R-groups and preferred embodiments
  MOD_RES (18)..(21): Any L- or D-natural or non-natural amino acid, and this range may encompass 1 or 4 residues; see specification as filed for detailed description of substitutions, R-groups and preferred embodiments
  c-term may be amidated
VPLSRTXRXTXXSISNQXXXXLNPESKAIKNLLK

SEQ ID NO: 367 - protein, 34 aa, Artificial Sequence
  Description of Artificial Sequence: Synthetic peptide
  MOD_RES (8)..(9): Any L- or D-natural amino acid and any non-natural amino acid; see specification as filed for detailed description of substitutions, R-groups and preferred embodiments
  MOD_RES (11)..(12): Any L- or D-natural amino acid and any non-natural amino acid; see specification as filed for detailed description of substitutions, R-groups and preferred embodiments
  MOD_RES (18)..(21): Any L- or D-natural or non-natural amino acid, and this range may encompass 1 or 4 residues; see specification as filed for detailed description of substitutions, R-groups and preferred embodiments
  c-term may be amidated
VPLSRTVXXTXXSISNQXXXXLNPESKAIKNLLK

SEQ ID NO: 368 - protein, 34 aa, Artificial Sequence
  Description of Artificial Sequence: Synthetic peptide
  MOD_RES (13)..(13): Any L- or D-natural amino acid and any non-natural amino acid; see specification as filed for detailed description of substitutions, R-groups and preferred embodiments
  MOD_RES (18)..(21): Any L- or D-natural or non-natural amino acid, and this range may encompass 1 or 4 residues; see specification as filed for detailed description of substitutions, R-groups and preferred embodiments
  c-term may be amidated
VPLSRTVRCTCIXISNQXXXXLNPESKAIKNLLK

SEQ ID NO: 369 - protein, 34 aa, Artificial Sequence
  Description of Artificial Sequence: Synthetic peptide
  MOD_RES (1)..(1): Any L- or D-natural amino acid and any non-natural amino acid; see specification as filed for detailed description of substitutions, R-groups and preferred embodiments
  MOD_RES (9)..(9): Any L- or D-natural amino acid and any non-natural amino acid; see specification as filed for detailed description of substitutions, R-groups and preferred embodiments
  MOD_RES (11)..(11): Any L- or D-natural amino acid and any non-natural amino acid; see specification as filed for detailed description of substitutions, R-groups and preferred embodiments
  MOD_RES (13)..(13): Any L- or D-natural amino acid and any non-natural amino acid; see specification as filed for detailed description of substitutions, R-groups and preferred embodiments
  MOD_RES (18)..(21): Any L- or D-natural or non-natural amino acid, and this range may encompass 1 or 4 residues; see specification as filed for detailed description of substitutions, R-groups and preferred embodiments
  c-term may be amidated
XPLSRTVRXTXIXISNQXXXXLNPESKAIKNLLK

SEQ ID NO: 370 - protein, 34 aa, Artificial Sequence
  Description of Artificial Sequence: Synthetic peptide
  MOD_RES (2)..(2): Any L- or D-natural amino acid and any non-natural amino acid; see specification as filed for detailed description of substitutions, R-groups and preferred embodiments
  MOD_RES (9)..(9): Any L- or D-natural amino acid and any non-natural amino acid; see specification as filed for detailed description of substitutions, R-groups and preferred embodiments
  MOD_RES (11)..(11): Any L- or D-natural amino acid and any non-natural amino acid; see specification as filed for detailed description of substitutions, R-groups and preferred embodiments
  MOD_RES (13)..(13): Any L- or D-natural amino acid and any non-natural amino acid; see specification as filed for detailed description of substitutions, R-groups and preferred embodiments
  MOD_RES (18)..(21): Any L- or D-natural or non-natural amino acid, and this range may encompass 1 or 4 residues; see specification as filed for detailed description of substitutions, R-groups and preferred embodiments
  c-term may be amidated
VXLSRTVRXTXIXISNQXXXXLNPESKAIKNLLK

SEQ ID NO: 371 - protein, 34 aa, Artificial Sequence
  Description of Artificial Sequence: Synthetic peptide
  MOD_RES (3)..(3): Any L- or D-natural amino acid and any non-natural amino acid; see specification as filed for detailed description of substitutions, R-groups and preferred embodiments
  MOD_RES (9)..(9): Any L- or D-natural amino acid and any non-natural amino acid; see specification as filed for detailed description of substitutions, R-groups and preferred embodiments
  MOD_RES (11)..(11): Any L- or D-natural amino acid and any non-natural amino acid; see specification as filed for detailed description of substitutions, R-groups and preferred embodiments
  MOD_RES (13)..(13): Any L- or D-natural amino acid and any non-natural amino acid; see specification as filed for detailed description of substitutions, R-groups and preferred embodiments
  MOD_RES (18)..(21): Any L- or D-natural or non-natural amino acid, and this range may encompass 1 or 4 residues; see specification as filed for detailed description of substitutions, R-groups and preferred embodiments
  c-term may be amidated
VPXSRTVRXTXIXISNQXXXXLNPESKAIKNLLK

SEQ ID NO: 372 - protein, 34 aa, Artificial Sequence
  Description of Artificial Sequence: Synthetic peptide
  MOD_RES (4)..(4): Any L- or D-natural amino acid and any non-natural amino acid; see specification as filed for detailed description of substitutions, R-groups and preferred embodiments
  MOD_RES (9)..(9): Any L- or D-natural amino acid and any non-natural amino acid; see specification as filed for detailed description of substitutions, R-groups and preferred embodiments
  MOD_RES (11)..(11): Any L- or D-natural amino acid and any non-natural amino acid; see specification as filed for detailed description of substitutions, R-groups and preferred embodiments
  MOD_RES (13)..(13): Any L- or D-natural amino acid and any non-natural amino acid; see specification as filed for detailed description of substitutions, R-groups and preferred embodiments
  MOD_RES (18)..(21): Any L- or D-natural or non-natural amino acid, and this range may encompass 1 or 4 residues; see specification as filed for detailed description of substitutions, R-groups and preferred embodiments
  c-term may be amidated
VPLXRTVRXTXIXISNQXXXXLNPESKAIKNLLK

SEQ ID NO: 373 - protein, 34 aa, Artificial Sequence
  Description of Artificial Sequence: Synthetic peptide
  MOD_RES (5)..(5): Any L- or D-natural amino acid and any non-natural amino acid; see specification as filed for detailed description of substitutions, R-groups and preferred embodiments
  MOD_RES (9)..(9): Any L- or D-natural amino acid and any non-natural amino acid; see specification as filed for detailed description of substitutions, R-groups and preferred embodiments
  MOD_RES (11)..(11): Any L- or D-natural amino acid and any non-natural amino acid; see specification as filed for detailed description of substitutions, R-groups and preferred embodiments
  MOD_RES (13)..(13): Any L- or D-natural amino acid and any non-natural amino acid; see specification as filed for detailed description of substitutions, R-groups and preferred embodiments
  MOD_RES (18)..(21): Any L- or D-natural or non-natural amino acid, and this range may encompass 1 or 4 residues; see specification as filed for detailed description of substitutions, R-groups and preferred embodiments
  c-term may be amidated
VPLSXTVRXTXIXISNQXXXXLNPESKAIKNLLK

SEQ ID NO: 374 - protein, 34 aa, Artificial Sequence
  Description of Artificial Sequence: Synthetic peptide
  MOD_RES (6)..(6): Any L- or D-natural amino acid and any non-natural amino acid; see specification as filed for detailed description of substitutions, R-groups and preferred embodiments
  MOD_RES (9)..(9): Any L- or D-natural amino acid and any non-natural amino acid; see specification as filed for detailed description of substitutions, R-groups and preferred embodiments
  MOD_RES (11)..(11): Any L- or D-natural amino acid and any non-natural amino acid; see specification as filed for detailed description of substitutions, R-groups and preferred embodiments
  MOD_RES (13)..(13): Any L- or D-natural amino acid and any non-natural amino acid; see specification as filed for detailed description of substitutions, R-groups and preferred embodiments
  MOD_RES (18)..(21): Any L- or D-natural or non-natural amino acid, and this range may encompass 1 or 4 residues; see specification as filed for detailed description of substitutions, R-groups and preferred embodiments
  c-term may be amidated
VPLSRXVRXTXIXISNQXXXXLNPESKAIKNLLK

SEQ ID NO: 375 - protein, 34 aa, Artificial Sequence
  Description of Artificial Sequence: Synthetic peptide
  MOD_RES (7)..(7): Any L- or D-natural amino acid and any non-natural amino acid; see specification as filed for detailed description of substitutions, R-groups and preferred embodiments
  MOD_RES (9)..(9): Any L- or D-natural amino acid and any non-natural amino acid; see specification as filed for detailed description of substitutions, R-groups and preferred embodiments
  MOD_RES (11)..(11): Any L- or D-natural amino acid and any non-natural amino acid; see specification as filed for detailed description of substitutions, R-groups and preferred embodiments
  MOD_RES (13)..(13): Any L- or D-natural amino acid and any non-natural amino acid; see specification as filed for detailed description of substitutions, R-groups and preferred embodiments
  MOD_RES (18)..(21): Any L- or D-natural or non-natural amino acid, and this range may encompass 1 or 4 residues; see specification as filed for detailed description of substitutions, R-groups and preferred embodiments
  c-term may be amidated
VPLSRTXRXTXIXISNQXXXXLNPESKAIKNLLK

SEQ ID NO: 376 - protein, 34 aa, Artificial Sequence
  Description of Artificial Sequence: Synthetic peptide
  MOD_RES (8)..(9): Any L- or D-natural amino acid and any non-natural amino acid; see specification as filed for detailed description of substitutions, R-groups and preferred embodiments
  MOD_RES (11)..(11): Any L- or D-natural amino acid and any non-natural amino acid; see specification as filed for detailed description of substitutions, R-groups and preferred embodiments
  MOD_RES (13)..(13): Any L- or D-natural amino acid and any non-natural amino acid; see specification as filed for detailed description of substitutions, R-groups and preferred embodiments
  MOD_RES (18)..(21): Any L- or D-natural or non-natural amino acid, and this range may encompass 1 or 4 residues; see specification as filed for detailed description of substitutions, R-groups and preferred embodiments
  c-term may be amidated
VPLSRTVXXTXIXISNQXXXXLNPESKAIKNLLK

SEQ ID NO: 377 - protein, 34 aa, Artificial Sequence
  Description of Artificial Sequence: Synthetic peptide
  MOD_RES (14)..(14): Any L- or D-natural amino acid and any non-natural amino acid; see specification as filed for detailed description of substitutions, R-groups and preferred embodiments
  MOD_RES (18)..(21): Any L- or D-natural or non-natural amino acid, and this range may encompass 1 or 4 residues; see specification as filed for detailed description of substitutions, R-groups and preferred embodiments
  c-term may be amidated
VPLSRTVRCTCISXSNQXXXXLNPESKAIKNLLK

SEQ ID NO: 378 - protein, 34 aa, Artificial Sequence
  Description of Artificial Sequence: Synthetic peptide
  MOD_RES (1)..(1): Any L- or D-natural amino acid and any non-natural amino acid; see specification as filed for detailed description of substitutions, R-groups and preferred embodiments
  MOD_RES (9)..(9): Any L- or D-natural amino acid and any non-natural amino acid; see specification as filed for detailed description of substitutions, R-groups and preferred embodiments
  MOD_RES (11)..(11): Any L- or D-natural amino acid and any non-natural amino acid; see specification as filed for detailed description of substitutions, R-groups and preferred embodiments
  MOD_RES (14)..(14): Any L- or D-natural amino acid and any non-natural amino acid; see specification as filed for detailed description of substitutions, R-groups and preferred embodiments
  MOD_RES (18)..(21): Any L- or D-natural or non-natural amino acid, and this range may encompass 1 or 4 residues; see specification as filed for detailed description of substitutions, R-groups and preferred embodiments
  c-term may be amidated
XPLSRTVRXTXISXSNQXXXXLNPESKAIKNLLK

SEQ ID NO: 379 - protein, 34 aa, Artificial Sequence
  Description of Artificial Sequence: Synthetic peptide
  MOD_RES (2)..(2): Any L- or D-natural amino acid and any non-natural amino acid; see specification as filed for detailed description of substitutions, R-groups and preferred embodiments
  MOD_RES (9)..(9): Any L- or D-natural amino acid and any non-natural amino acid; see specification as filed for detailed description of substitutions, R-groups and preferred embodiments
  MOD_RES (11)..(11): Any L- or D-natural amino acid and any non-natural amino acid; see specification as filed for detailed description of substitutions, R-groups and preferred embodiments
  MOD_RES (14)..(14): Any L- or D-natural amino acid and any non-natural amino acid; see specification as filed for detailed description of substitutions, R-groups and preferred embodiments
  MOD_RES (18)..(21): Any L- or D-natural or non-natural amino acid, and this range may encompass 1 or 4 residues; see specification as filed for detailed description of substitutions, R-groups and preferred embodiments
  c-term may be amidated
VXLSRTVRXTXISXSNQXXXXLNPESKAIKNLLK

SEQ ID NO: 380 - protein, 34 aa, Artificial Sequence
  Description of Artificial Sequence: Synthetic peptide
  MOD_RES (3)..(3): Any L- or D-natural amino acid and any non-natural amino acid; see specification as filed for detailed description of substitutions, R-groups and preferred embodiments
  MOD_RES (9)..(9): Any L- or D-natural amino acid and any non-natural amino acid; see specification as filed for detailed description of substitutions, R-groups and preferred embodiments
  MOD_RES (11)..(11): Any L- or D-natural amino acid and any non-natural amino acid; see specification as filed for detailed description of substitutions, R-groups and preferred embodiments
  MOD_RES (14)..(14): Any L- or D-natural amino acid and any non-natural amino acid; see specification as filed for detailed description of substitutions, R-groups and preferred embodiments
  MOD_RES (18)..(21): Any L- or D-natural or non-natural amino acid, and this range may encompass 1 or 4 residues; see specification as filed for detailed description of substitutions, R-groups and preferred embodimentss
  c-term may be amidated
VPXSRTVRXTXISXSNQXXXXLNPESKAIKNLLK

SEQ ID NO: 381 - protein, 34 aa, Artificial Sequence
  Description of Artificial Sequence: Synthetic peptide
  MOD_RES (4)..(4): Any L- or D-natural amino acid and any non-natural amino acid; see specification as filed for detailed description of substitutions, R-groups and preferred embodiments
  MOD_RES (9)..(9): Any L- or D-natural amino acid and any non-natural amino acid; see specification as filed for detailed description of substitutions, R-groups and preferred embodiments
  MOD_RES (11)..(11): Any L- or D-natural amino acid and any non-natural amino acid; see specification as filed for detailed description of substitutions, R-groups and preferred embodiments
  MOD_RES (14)..(14): Any L- or D-natural amino acid and any non-natural amino acid; see specification as filed for detailed description of substitutions, R-groups and preferred embodiments
  MOD_RES (18)..(21): Any L- or D-natural or non-natural amino acid, and this range may encompass 1 or 4 residues; see specification as filed for detailed description of substitutions, R-groups and preferred embodiments
  c-term may be amidated
VPLXRTVRXTXISXSNQXXXXLNPESKAIKNLLK

SEQ ID NO: 382 - protein, 34 aa, Artificial Sequence
  Description of Artificial Sequence: Synthetic peptide
  MOD_RES (5)..(5): Any L- or D-natural amino acid and any non-natural amino acid; see specification as filed for detailed description of substitutions, R-groups and preferred embodiments
  MOD_RES (9)..(9): Any L- or D-natural amino acid and any non-natural amino acid; see specification as filed for detailed description of substitutions, R-groups and preferred embodiments
  MOD_RES (11)..(11): Any L- or D-natural amino acid and any non-natural amino acid; see specification as filed for detailed description of substitutions, R-groups and preferred embodiments
  MOD_RES (14)..(14): Any L- or D-natural amino acid and any non-natural amino acid; see specification as filed for detailed description of substitutions, R-groups and preferred embodiments
  MOD_RES (18)..(21): Any L- or D-natural or non-natural amino acid, and this range may encompass 1 or 4 residues; see specification as filed for detailed description of substitutions, R-groups and preferred embodiments
  c-term may be amidated
VPLSXTVRXTXISXSNQXXXXLNPESKAIKNLLK

SEQ ID NO: 383 - protein, 34 aa, Artificial Sequence
  Description of Artificial Sequence: Synthetic peptide
  MOD_RES (6)..(6): Any L- or D-natural amino acid and any non-natural amino acid; see specification as filed for detailed description of substitutions, R-groups and preferred embodiments
  MOD_RES (9)..(9): Any L- or D-natural amino acid and any non-natural amino acid; see specification as filed for detailed description of substitutions, R-groups and preferred embodiments
  MOD_RES (11)..(11): Any L- or D-natural amino acid and any non-natural amino acid; see specification as filed for detailed description of substitutions, R-groups and preferred embodiments
  MOD_RES (14)..(14): Any L- or D-natural amino acid and any non-natural amino acid; see specification as filed for detailed description of substitutions, R-groups and preferred embodiments
  MOD_RES (18)..(21): Any L- or D-natural or non-natural amino acid, and this range may encompass 1 or 4 residues; see specification as filed for detailed description of substitutions, R-groups and preferred embodiments
  c-term may be amidated
VPLSRXVRXTXISXSNQXXXXLNPESKAIKNLLK

SEQ ID NO: 384 - protein, 34 aa, Artificial Sequence
  Description of Artificial Sequence: Synthetic peptide
  MOD_RES (7)..(7): Any L- or D-natural amino acid and any non-natural amino acid; see specification as filed for detailed description of substitutions, R-groups and preferred embodiments
  MOD_RES (9)..(9): Any L- or D-natural amino acid and any non-natural amino acid; see specification as filed for detailed description of substitutions, R-groups and preferred embodiments
  MOD_RES (11)..(11): Any L- or D-natural amino acid and any non-natural amino acid; see specification as filed for detailed description of substitutions, R-groups and preferred embodiments
  MOD_RES (14)..(14): Any L- or D-natural amino acid and any non-natural amino acid; see specification as filed for detailed description of substitutions, R-groups and preferred embodiments
  MOD_RES (18)..(21): Any L- or D-natural or non-natural amino acid, and this range may encompass 1 or 4 residues; see specification as filed for detailed description of substitutions, R-groups and preferred embodiments
  c-term may be amidated
VPLSRTXRXTXISXSNQXXXXLNPESKAIKNLLK

SEQ ID NO: 385 - protein, 34 aa, Artificial Sequence
  Description of Artificial Sequence: Synthetic peptide
  MOD_RES (8)..(9): Any L- or D-natural amino acid and any non-natural amino acid; see specification as filed for detailed description of substitutions, R-groups and preferred embodiments
  MOD_RES (11)..(11): Any L- or D-natural amino acid and any non-natural amino acid; see specification as filed for detailed description of substitutions, R-groups and preferred embodiments
  MOD_RES (14)..(14): Any L- or D-natural amino acid and any non-natural amino acid; see specification as filed for detailed description of substitutions, R-groups and preferred embodiments
  MOD_RES (18)..(21): Any L- or D-natural or non-natural amino acid, and this range may encompass 1 or 4 residues; see specification as filed for detailed description of substitutions, R-groups and preferred embodiments
  c-term may be amidated
VPLSRTVXXTXISXSNQXXXXLNPESKAIKNLLK

SEQ ID NO: 386 - protein, 34 aa, Artificial Sequence
  Description of Artificial Sequence: Synthetic peptide
  MOD_RES (16)..(16): Any L- or D-natural amino acid and any non-natural amino acid; see specification as filed for detailed description of substitutions, R-groups and preferred embodiments
  MOD_RES (18)..(21): Any L- or D-natural or non-natural amino acid, and this range may encompass 1 or 4 residues; see specification as filed for detailed description of substitutions, R-groups and preferred embodiments
  c-term may be amidated
VPLSRTVRCTCISISXQXXXXLNPESKAIKNLLK

SEQ ID NO: 387 - protein, 34 aa, Artificial Sequence
  Description of Artificial Sequence: Synthetic peptide
  MOD_RES (1)..(1): Any L- or D-natural amino acid and any non-natural amino acid; see specification as filed for detailed description of substitutions, R-groups and preferred embodiments
  MOD_RES (9)..(9): Any L- or D-natural amino acid and any non-natural amino acid; see specification as filed for detailed description of substitutions, R-groups and preferred embodiments
  MOD_RES (11)..(11): Any L- or D-natural amino acid and any non-natural amino acid; see specification as filed for detailed description of substitutions, R-groups and preferred embodiments
  MOD_RES (16)..(16): Any L- or D-natural amino acid and any non-natural amino acid; see specification as filed for detailed description of substitutions, R-groups and preferred embodiments
  MOD_RES (18)..(21): Any L- or D-natural or non-natural amino acid, and this range may encompass 1 or 4 residues; see specification as filed for detailed description of substitutions, R-groups and preferred embodiments
  c-term may be amidated
XPLSRTVRXTXISISXQXXXXLNPESKAIKNLLK

SEQ ID NO: 388 - protein, 34 aa, Artificial Sequence
  Description of Artificial Sequence: Synthetic peptide
  MOD_RES (2)..(2): Any L- or D-natural amino acid and any non-natural amino acid; see specification as filed for detailed description of substitutions, R-groups and preferred embodiments
  MOD_RES (9)..(9): Any L- or D-natural amino acid and any non-natural amino acid; see specification as filed for detailed description of substitutions, R-groups and preferred embodiments
  MOD_RES (11)..(11): Any L- or D-natural amino acid and any non-natural amino acid; see specification as filed for detailed description of substitutions, R-groups and preferred embodiments
  MOD_RES (16)..(16): Any L- or D-natural amino acid and any non-natural amino acid; see specification as filed for detailed description of substitutions, R-groups and preferred embodiments
  MOD_RES (18)..(21): Any L- or D-natural or non-natural amino acid, and this range may encompass 1 or 4 residues; see specification as filed for detailed description of substitutions, R-groups and preferred embodiments
  c-term may be amidated
VXLSRTVRXTXISISXQXXXXLNPESKAIKNLLK

SEQ ID NO: 389 - protein, 34 aa, Artificial Sequence
  Description of Artificial Sequence: Synthetic peptide
  MOD_RES (3)..(3): Any L- or D-natural amino acid and any non-natural amino acid; see specification as filed for detailed description of substitutions, R-groups and preferred embodiments
  MOD_RES (9)..(9): Any L- or D-natural amino acid and any non-natural amino acid; see specification as filed for detailed description of substitutions, R-groups and preferred embodiments
  MOD_RES (11)..(11): Any L- or D-natural amino acid and any non-natural amino acid; see specification as filed for detailed description of substitutions, R-groups and preferred embodiments
  MOD_RES (16)..(16): Any L- or D-natural amino acid and any non-natural amino acid; see specification as filed for detailed description of substitutions, R-groups and preferred embodiments
  MOD_RES (18)..(21): Any L- or D-natural or non-natural amino acid, and this range may encompass 1 or 4 residues; see specification as filed for detailed description of substitutions, R-groups and preferred embodiments
  c-term may be amidated
VPXSRTVRXTXISISXQXXXXLNPESKAIKNLLK

SEQ ID NO: 390 - protein, 34 aa, Artificial Sequence
  Description of Artificial Sequence: Synthetic peptide
  MOD_RES (4)..(4): Any L- or D-natural amino acid and any non-natural amino acid; see specification as filed for detailed description of substitutions, R-groups and preferred embodiments
  MOD_RES (9)..(9): Any L- or D-natural amino acid and any non-natural amino acid; see specification as filed for detailed description of substitutions, R-groups and preferred embodiments
  MOD_RES (11)..(11): Any L- or D-natural amino acid and any non-natural amino acid; see specification as filed for detailed description of substitutions, R-groups and preferred embodiments
  MOD_RES (16)..(16): Any L- or D-natural amino acid and any non-natural amino acid; see specification as filed for detailed description of substitutions, R-groups and preferred embodiments
  MOD_RES (18)..(21): Any L- or D-natural or non-natural amino acid, and this range may encompass 1 or 4 residues; see specification as filed for detailed description of substitutions, R-groups and preferred embodiments
  c-term may be amidated
VPLXRTVRXTXISISXQXXXXLNPESKAIKNLLK

SEQ ID NO: 391 - protein, 34 aa, Artificial Sequence
  Description of Artificial Sequence: Synthetic peptide
  MOD_RES (5)..(5): Any L- or D-natural amino acid and any non-natural amino acid; see specification as filed for detailed description of substitutions, R-groups and preferred embodiments
  MOD_RES (9)..(9): Any L- or D-natural amino acid and any non-natural amino acid; see specification as filed for detailed description of substitutions, R-groups and preferred embodiments
  MOD_RES (11)..(11): Any L- or D-natural amino acid and any non-natural amino acid; see specification as filed for detailed description of substitutions, R-groups and preferred embodiments
  MOD_RES (16)..(16): Any L- or D-natural amino acid and any non-natural amino acid; see specification as filed for detailed description of substitutions, R-groups and preferred embodiments
  MOD_RES (18)..(21): Any L- or D-natural or non-natural amino acid, and this range may encompass 1 or 4 residues; see specification as filed for detailed description of substitutions, R-groups and preferred embodiments
  c-term may be amidated
VPLSXTVRXTXISISXQXXXXLNPESKAIKNLLK

SEQ ID NO: 392 - protein, 34 aa, Artificial Sequence
  Description of Artificial Sequence: Synthetic peptide
  MOD_RES (6)..(6): Any L- or D-natural amino acid and any non-natural amino acid; see specification as filed for detailed description of substitutions, R-groups and preferred embodiments
  MOD_RES (9)..(9): Any L- or D-natural amino acid and any non-natural amino acid; see specification as filed for detailed description of substitutions, R-groups and preferred embodiments
  MOD_RES (11)..(11): Any L- or D-natural amino acid and any non-natural amino acid; see specification as filed for detailed description of substitutions, R-groups and preferred embodiments
  MOD_RES (16)..(16): Any L- or D-natural amino acid and any non-natural amino acid; see specification as filed for detailed description of substitutions, R-groups and preferred embodiments
  MOD_RES (18)..(21): Any L- or D-natural or non-natural amino acid, and this range may encompass 1 or 4 residues; see specification as filed for detailed description of substitutions, R-groups and preferred embodiments
  c-term may be amidated
VPLSRXVRXTXISISXQXXXXLNPESKAIKNLLK

SEQ ID NO: 393 - protein, 34 aa, Artificial Sequence
  Description of Artificial Sequence: Synthetic peptide
  MOD_RES (7)..(7): Any L- or D-natural amino acid and any non-natural amino acid; see specification as filed for detailed description of substitutions, R-groups and preferred embodiments
  MOD_RES (9)..(9): Any L- or D-natural amino acid and any non-natural amino acid; see specification as filed for detailed description of substitutions, R-groups and preferred embodiments
  MOD_RES (11)..(11): Any L- or D-natural amino acid and any non-natural amino acid; see specification as filed for detailed description of substitutions, R-groups and preferred embodiments
  MOD_RES (16)..(16): Any L- or D-natural amino acid and any non-natural amino acid; see specification as filed for detailed description of substitutions, R-groups and preferred embodiments
  MOD_RES (18)..(21): Any L- or D-natural or non-natural amino acid, and this range may encompass 1 or 4 residues; see specification as filed for detailed description of substitutions, R-groups and preferred embodiments
  c-term may be amidated
VPLSRTXRXTXISISXQXXXXLNPESKAIKNLLK

SEQ ID NO: 394 - protein, 34 aa, Artificial Sequence
  Description of Artificial Sequence: Synthetic peptide
  MOD_RES (8)..(9): Any L- or D-natural amino acid and any non-natural amino acid; see specification as filed for detailed description of substitutions, R-groups and preferred embodiments
  MOD_RES (11)..(11): Any L- or D-natural amino acid and any non-natural amino acid; see specification as filed for detailed description of substitutions, R-groups and preferred embodiments
  MOD_RES (16)..(16): Any L- or D-natural amino acid and any non-natural amino acid; see specification as filed for detailed description of substitutions, R-groups and preferred embodiments
  MOD_RES (18)..(21): Any L- or D-natural or non-natural amino acid, and this range may encompass 1 or 4 residues; see specification as filed for detailed description of substitutions, R-groups and preferred embodiments
  c-term may be amidated
VPLSRTVXXTXISISXQXXXXLNPESKAIKNLLK

SEQ ID NO: 395 - protein, 34 aa, Artificial Sequence
  Description of Artificial Sequence: Synthetic peptide
  MOD_RES (17)..(17): Any L- or D-natural amino acid and any non-natural amino acid; see specification as filed for detailed description of substitutions, R-groups and preferred embodiments
  MOD_RES (18)..(21): Any L- or D-natural or non-natural amino acid, and this range may encompass 1 or 4 residues; see specification as filed for detailed description of substitutions, R-groups and preferred embodiments
  c-term may be amidated
VPLSRTVRCTCISISQXXXXXLNPESKAIKNLLK

SEQ ID NO: 396 - protein, 34 aa, Artificial Sequence
  Description of Artificial Sequence: Synthetic peptide
  MOD_RES (1)..(1): Any L- or D-natural amino acid and any non-natural amino acid; see specification as filed for detailed description of substitutions, R-groups and preferred embodiments
  MOD_RES (9)..(9): Any L- or D-natural amino acid and any non-natural amino acid; see specification as filed for detailed description of substitutions, R-groups and preferred embodiments
  MOD_RES (11)..(11): Any L- or D-natural amino acid and any non-natural amino acid; see specification as filed for detailed description of substitutions, R-groups and preferred embodiments
  MOD_RES (17)..(17): Any L- or D-natural amino acid and any non-natural amino acid; see specification as filed for detailed description of substitutions, R-groups and preferred embodiments
  MOD_RES (18)..(21): Any L- or D-natural or non-natural amino acid, and this range may encompass 1 or 4 residues; see specification as filed for detailed description of substitutions, R-groups and preferred embodiments
  c-term may be amidated
XPLSRTVRXTXISISQXXXXXLNPESKAIKNLLK

SEQ ID NO: 397 - protein, 34 aa, Artificial Sequence
  Description of Artificial Sequence: Synthetic peptide
  MOD_RES (2)..(2): Any L- or D-natural amino acid and any non-natural amino acid; see specification as filed for detailed description of substitutions, R-groups and preferred embodiments
  MOD_RES (9)..(9): Any L- or D-natural amino acid and any non-natural amino acid; see specification as filed for detailed description of substitutions, R-groups and preferred embodiments
  MOD_RES (11)..(11): Any L- or D-natural amino acid and any non-natural amino acid; see specification as filed for detailed description of substitutions, R-groups and preferred embodiments
  MOD_RES (17)..(17): Any L- or D-natural amino acid and any non-natural amino acid; see specification as filed for detailed description of substitutions, R-groups and preferred embodiments
  MOD_RES (18)..(21): Any L- or D-natural or non-natural amino acid, and this range may encompass 1 or 4 residues; see specification as filed for detailed description of substitutions, R-groups and preferred embodiments
  c-term may be amidated
VXLSRTVRXTXISISQXXXXXLNPESKAIKNLLK

SEQ ID NO: 398 - protein, 34 aa, Artificial Sequence
  Description of Artificial Sequence: Synthetic peptide
  MOD_RES (3)..(3): Any L- or D-natural amino acid and any non-natural amino acid; see specification as filed for detailed description of substitutions, R-groups and preferred embodiments
  MOD_RES (9)..(9): Any L- or D-natural amino acid and any non-natural amino acid; see specification as filed for detailed description of substitutions, R-groups and preferred embodiments
  MOD_RES (11)..(11): Any L- or D-natural amino acid and any non-natural amino acid; see specification as filed for detailed description of substitutions, R-groups and preferred embodiments
  MOD_RES (17)..(17): Any L- or D-natural amino acid and any non-natural amino acid; see specification as filed for detailed description of substitutions, R-groups and preferred embodiments
  MOD_RES (18)..(21): Any L- or D-natural or non-natural amino acid, and this range may encompass 1 or 4 residues; see specification as filed for detailed description of substitutions, R-groups and preferred embodiments
  c-term may be amidated
VPXSRTVRXTXISISQXXXXXLNPESKAIKNLLK

SEQ ID NO: 399 - protein, 34 aa, Artificial Sequence
  Description of Artificial Sequence: Synthetic peptide
  MOD_RES (4)..(4): Any L- or D-natural amino acid and any non-natural amino acid; see specification as filed for detailed description of substitutions, R-groups and preferred embodiments
  MOD_RES (9)..(9): Any L- or D-natural amino acid and any non-natural amino acid; see specification as filed for detailed description of substitutions, R-groups and preferred embodiments
  MOD_RES (11)..(11): Any L- or D-natural amino acid and any non-natural amino acid; see specification as filed for detailed description of substitutions, R-groups and preferred embodiments
  MOD_RES (17)..(17): Any L- or D-natural amino acid and any non-natural amino acid; see specification as filed for detailed description of substitutions, R-groups and preferred embodiments
  MOD_RES (18)..(21): Any L- or D-natural or non-natural amino acid, and this range may encompass 1 or 4 residues; see specification as filed for detailed description of substitutions, R-groups and preferred embodiments
  c-term may be amidated
VPLXRTVRXTXISISQXXXXXLNPESKAIKNLLK

SEQ ID NO: 400 - protein, 34 aa, Artificial Sequence
  Description of Artificial Sequence: Synthetic peptide
  MOD_RES (5)..(5): Any L- or D-natural amino acid and any non-natural amino acid; see specification as filed for detailed description of substitutions, R-groups and preferred embodiments
  MOD_RES (9)..(9): Any L- or D-natural amino acid and any non-natural amino acid; see specification as filed for detailed description of substitutions, R-groups and preferred embodiments
  MOD_RES (11)..(11): Any L- or D-natural amino acid and any non-natural amino acid; see specification as filed for detailed description of substitutions, R-groups and preferred embodiments
  MOD_RES (17)..(17): Any L- or D-natural amino acid and any non-natural amino acid; see specification as filed for detailed description of substitutions, R-groups and preferred embodiments
  MOD_RES (18)..(21): Any L- or D-natural or non-natural amino acid, and this range may encompass 1 or 4 residues; see specification as filed for detailed description of substitutions, R-groups and preferred embodiments
  c-term may be amidated
VPLSXTVRXTXISISQXXXXXLNPESKAIKNLLK

SEQ ID NO: 401 - protein, 34 aa, Artificial Sequence
  Description of Artificial Sequence: Synthetic peptide
  MOD_RES (6)..(6): Any L- or D-natural amino acid and any non-natural amino acid; see specification as filed for detailed description of substitutions, R-groups and preferred embodiments
  MOD_RES (9)..(9): Any L- or D-natural amino acid and any non-natural amino acid; see specification as filed for detailed description of substitutions, R-groups and preferred embodiments
  MOD_RES (11)..(11): Any L- or D-natural amino acid and any non-natural amino acid; see specification as filed for detailed description of substitutions, R-groups and preferred embodiments
  MOD_RES (17)..(17): Any L- or D-natural amino acid and any non-natural amino acid; see specification as filed for detailed description of substitutions, R-groups and preferred embodiments
  MOD_RES (18)..(21): Any L- or D-natural or non-natural amino acid, and this range may encompass 1 or 4 residues; see specification as filed for detailed description of substitutions, R-groups and preferred embodiments
  c-term may be amidated
VPLSRXVRXTXISISQXXXXXLNPESKAIKNLLK

SEQ ID NO: 402 - protein, 34 aa, Artificial Sequence
  Description of Artificial Sequence: Synthetic peptide
  MOD_RES (7)..(7): Any L- or D-natural amino acid and any non-natural amino acid; see specification as filed for detailed description of substitutions, R-groups and preferred embodiments
  MOD_RES (9)..(9): Any L- or D-natural amino acid and any non-natural amino acid; see specification as filed for detailed description of substitutions, R-groups and preferred embodiments
  MOD_RES (11)..(11): Any L- or D-natural amino acid and any non-natural amino acid; see specification as filed for detailed description of substitutions, R-groups and preferred embodiments
  MOD_RES (17)..(17): Any L- or D-natural amino acid and any non-natural amino acid; see specification as filed for detailed description of substitutions, R-groups and preferred embodiments
  MOD_RES (18)..(21): Any L- or D-natural or non-natural amino acid, and this range may encompass 1 or 4 residues; see specification as filed for detailed description of substitutions, R-groups and preferred embodiments
  c-term may be amidated
VPLSRTXRXTXISISQXXXXXLNPESKAIKNLLK

SEQ ID NO: 403 - protein, 34 aa, Artificial Sequence
  Description of Artificial Sequence: Synthetic peptide
  MOD_RES (8)..(9): Any L- or D-natural amino acid and any non-natural amino acid; see specification as filed for detailed description of substitutions, R-groups and preferred embodiments
  MOD_RES (11)..(11): Any L- or D-natural amino acid and any non-natural amino acid; see specification as filed for detailed description of substitutions, R-groups and preferred embodiments
  MOD_RES (17)..(17): Any L- or D-natural amino acid and any non-natural amino acid; see specification as filed for detailed description of substitutions, R-groups and preferred embodiments
  MOD_RES (18)..(21): Any L- or D-natural or non-natural amino acid, and this range may encompass 1 or 4 residues; see specification as filed for detailed description of substitutions, R-groups and preferred embodiments
  c-term may be amidated
VPLSRTVXXTXISISQXXXXXLNPESKAIKNLLK

SEQ ID NO: 404 - protein, 34 aa, Artificial Sequence
  Description of Artificial Sequence: Synthetic peptide
  MOD_RES (18)..(21): Any L- or D-natural or non-natural amino acid, and this range may encompass 1 or 4 residues; see specification as filed for detailed description of substitutions, R-groups and preferred embodiments
  c-term may be amidated
VPLSRTVRCTCISISNQXXXXKAIKNLLKAVSKE

SEQ ID NO: 405 - protein, 34 aa, Artificial Sequence
  Description of Artificial Sequence: Synthetic peptide
  MOD_RES (1)..(1): Any L- or D-natural amino acid and any non-natural amino acid; see specification as filed for detailed description of substitutions, R-groups and preferred embodiments
  MOD_RES (9)..(9): Any L- or D-natural amino acid and any non-natural amino acid; see specification as filed for detailed description of substitutions, R-groups and preferred embodiments
  MOD_RES (11)..(11): Any L- or D-natural amino acid and any non-natural amino acid; see specification as filed for detailed description of substitutions, R-groups and preferred embodiments
  MOD_RES (18)..(21): Any L- or D-natural or non-natural amino acid, and this range may encompass 1 or 4 residues; see specification as filed for detailed description of substitutions, R-groups and preferred embodiments
  c-term may be amidated
XPLSRTVRXTXISISNQXXXXKAIKNLLKAVSKE

SEQ ID NO: 406 - protein, 34 aa, Artificial Sequence
  Description of Artificial Sequence: Synthetic peptide
  MOD_RES (2)..(2): Any L- or D-natural amino acid and any non-natural amino acid; see specification as filed for detailed description of substitutions, R-groups and preferred embodiments
  MOD_RES (9)..(9): Any L- or D-natural amino acid and any non-natural amino acid; see specification as filed for detailed description of substitutions, R-groups and preferred embodiments
  MOD_RES (11)..(11): Any L- or D-natural amino acid and any non-natural amino acid; see specification as filed for detailed description of substitutions, R-groups and preferred embodiments
  MOD_RES (18)..(21): Any L- or D-natural or non-natural amino acid, and this range may encompass 1 or 4 residues; see specification as filed for detailed description of substitutions, R-groups and preferred embodiments
  c-term may be amidated
VXLSRTVRXTXISISNQXXXXKAIKNLLKAVSKE

SEQ ID NO: 407 - protein, 34 aa, Artificial Sequence
  Description of Artificial Sequence: Synthetic peptide
  MOD_RES (3)..(3): Any L- or D-natural amino acid and any non-natural amino acid; see specification as filed for detailed description of substitutions, R-groups and preferred embodiments
  MOD_RES (9)..(9): Any L- or D-natural amino acid and any non-natural amino acid; see specification as filed for detailed description of substitutions, R-groups and preferred embodiments
  MOD_RES (11)..(11): Any L- or D-natural amino acid and any non-natural amino acid; see specification as filed for detailed description of substitutions, R-groups and preferred embodiments
  MOD_RES (18)..(21): Any L- or D-natural or non-natural amino acid, and this range may encompass 1 or 4 residues; see specification as filed for detailed description of substitutions, R-groups and preferred embodiments
  c-term may be amidated
VPXSRTVRXTXISISNQXXXXKAIKNLLKAVSKE

SEQ ID NO: 408 - protein, 34 aa, Artificial Sequence
  Description of Artificial Sequence: Synthetic peptide
  MOD_RES (4)..(4): Any L- or D-natural amino acid and any non-natural amino acid; see specification as filed for detailed description of substitutions, R-groups and preferred embodiments
  MOD_RES (9)..(9): Any L- or D-natural amino acid and any non-natural amino acid; see specification as filed for detailed description of substitutions, R-groups and preferred embodiments
  MOD_RES (11)..(11): Any L- or D-natural amino acid and any non-natural amino acid; see specification as filed for detailed description of substitutions, R-groups and preferred embodiments
  MOD_RES (18)..(21): Any L- or D-natural or non-natural amino acid, and this range may encompass 1 or 4 residues; see specification as filed for detailed description of substitutions, R-groups and preferred embodiments
  c-term may be amidated
VPLXRTVRXTXISISNQXXXXKAIKNLLKAVSKE

SEQ ID NO: 409 - protein, 34 aa, Artificial Sequence
  Description of Artificial Sequence: Synthetic peptide
  MOD_RES (5)..(5): Any L- or D-natural amino acid and any non-natural amino acid; see specification as filed for detailed description of substitutions, R-groups and preferred embodiments
  MOD_RES (9)..(9): Any L- or D-natural amino acid and any non-natural amino acid; see specification as filed for detailed description of substitutions, R-groups and preferred embodiments
  MOD_RES (11)..(11): Any L- or D-natural amino acid and any non-natural amino acid; see specification as filed for detailed description of substitutions, R-groups and preferred embodiments
  MOD_RES (18)..(21): Any L- or D-natural or non-natural amino acid, and this range may encompass 1 or 4 residues; see specification as filed for detailed description of substitutions, R-groups and preferred embodiments
  c-term may be amidated
VPLSXTVRXTXISISNQXXXXKAIKNLLKAVSKE

SEQ ID NO: 410 - protein, 34 aa, Artificial Sequence
  Description of Artificial Sequence: Synthetic peptide
  MOD_RES (6)..(6): Any L- or D-natural amino acid and any non-natural amino acid; see specification as filed for detailed description of substitutions, R-groups and preferred embodiments
  MOD_RES (9)..(9): Any L- or D-natural amino acid and any non-natural amino acid; see specification as filed for detailed description of substitutions, R-groups and preferred embodiments
  MOD_RES (11)..(11): Any L- or D-natural amino acid and any non-natural amino acid; see specification as filed for detailed description of substitutions, R-groups and preferred embodiments
  MOD_RES (18)..(21): Any L- or D-natural or non-natural amino acid, and this range may encompass 1 or 4 residues; see specification as filed for detailed description of substitutions, R-groups and preferred embodiments
  c-term may be amidated
VPLSRXVRXTXISISNQXXXXKAIKNLLKAVSKE

SEQ ID NO: 411 - protein, 34 aa, Artificial Sequence
  Description of Artificial Sequence: Synthetic peptide
  MOD_RES (7)..(7): Any L- or D-natural amino acid and any non-natural amino acid; see specification as filed for detailed description of substitutions, R-groups and preferred embodiments
  MOD_RES (9)..(9): Any L- or D-natural amino acid and any non-natural amino acid; see specification as filed for detailed description of substitutions, R-groups and preferred embodiments
  MOD_RES (11)..(11): Any L- or D-natural amino acid and any non-natural amino acid; see specification as filed for detailed description of substitutions, R-groups and preferred embodiments
  MOD_RES (18)..(21): Any L- or D-natural or non-natural amino acid, and this range may encompass 1 or 4 residues; see specification as filed for detailed description of substitutions, R-groups and preferred embodiments
  c-term may be amidated
VPLSRTXRXTXISISNQXXXXKAIKNLLKAVSKE

SEQ ID NO: 412 - protein, 34 aa, Artificial Sequence
  Description of Artificial Sequence: Synthetic peptide
  MOD_RES (8)..(9): Any L- or D-natural amino acid and any non-natural amino acid; see specification as filed for detailed description of substitutions, R-groups and preferred embodiments
  MOD_RES (11)..(11): Any L- or D-natural amino acid and any non-natural amino acid; see specification as filed for detailed description of substitutions, R-groups and preferred embodiments
  MOD_RES (18)..(21): Any L- or D-natural or non-natural amino acid, and this range may encompass 1 or 4 residues; see specification as filed for detailed description of substitutions, R-groups and preferred embodiments
  c-term may be amidated
VPLSRTVXXTXISISNQXXXXKAIKNLLKAVSKE

SEQ ID NO: 413 - protein, 34 aa, Artificial Sequence
  Description of Artificial Sequence: Synthetic peptide
  MOD_RES (12)..(12): Any L- or D-natural amino acid and any non-natural amino acid; see specification as filed for detailed description of substitutions, R-groups and preferred embodiments
  MOD_RES (18)..(21): Any L- or D-natural or non-natural amino acid, and this range may encompass 1 or 4 residues; see specification as filed for detailed description of substitutions, R-groups and preferred embodiments
  c-term may be amidated
VPLSRTVRCTCXSISNQXXXXKAIKNLLKAVSKE

SEQ ID NO: 414 - protein, 34 aa, Artificial Sequence
  Description of Artificial Sequence: Synthetic peptide
  MOD_RES (1)..(1): Any L- or D-natural amino acid and any non-natural amino acid; see specification as filed for detailed description of substitutions, R-groups and preferred embodiments
  MOD_RES (9)..(9): Any L- or D-natural amino acid and any non-natural amino acid; see specification as filed for detailed description of substitutions, R-groups and preferred embodiments
  MOD_RES (11)..(12): Any L- or D-natural amino acid and any non-natural amino acid; see specification as filed for detailed description of substitutions, R-groups and preferred embodiments
  MOD_RES (18)..(21): Any L- or D-natural or non-natural amino acid, and this range may encompass 1 or 4 residues; see specification as filed for detailed description of substitutions, R-groups and preferred embodiments
  c-term may be amidated
XPLSRTVRXTXXSISNQXXXXKAIKNLLKAVSKE

SEQ ID NO: 415 - protein, 34 aa, Artificial Sequence
  Description of Artificial Sequence: Synthetic peptide
  MOD_RES (2)..(2): Any L- or D-natural amino acid and any non-natural amino acid; see specification as filed for detailed description of substitutions, R-groups and preferred embodiments
  MOD_RES (9)..(9): Any L- or D-natural amino acid and any non-natural amino acid; see specification as filed for detailed description of substitutions, R-groups and preferred embodiments
  MOD_RES (11)..(12): Any L- or D-natural amino acid and any non-natural amino acid; see specification as filed for detailed description of substitutions, R-groups and preferred embodiments
  MOD_RES (18)..(21): Any L- or D-natural or non-natural amino acid, and this range may encompass 1 or 4 residues; see specification as filed for detailed description of substitutions, R-groups and preferred embodiments
  c-term may be amidated
VXLSRTVRXTXXSISNQXXXXKAIKNLLKAVSKE

SEQ ID NO: 416 - protein, 34 aa, Artificial Sequence
  Description of Artificial Sequence: Synthetic peptide
  MOD_RES (3)..(3): Any L- or D-natural amino acid and any non-natural amino acid; see specification as filed for detailed description of substitutions, R-groups and preferred embodiments
  MOD_RES (9)..(9): Any L- or D-natural amino acid and any non-natural amino acid; see specification as filed for detailed description of substitutions, R-groups and preferred embodiments
  MOD_RES (11)..(12): Any L- or D-natural amino acid and any non-natural amino acid; see specification as filed for detailed description of substitutions, R-groups and preferred embodiments
  MOD_RES (18)..(21): Any L- or D-natural or non-natural amino acid, and this range may encompass 1 or 4 residues; see specification as filed for detailed description of substitutions, R-groups and preferred embodiments
  c-term may be amidated
VPXSRTVRXTXXSISNQXXXXKAIKNLLKAVSKE

SEQ ID NO: 417 - protein, 34 aa, Artificial Sequence
  Description of Artificial Sequence: Synthetic peptide
  MOD_RES (4)..(4): Any L- or D-natural amino acid and any non-natural amino acid; see specification as filed for detailed description of substitutions, R-groups and preferred embodiments
  MOD_RES (9)..(9): Any L- or D-natural amino acid and any non-natural amino acid; see specification as filed for detailed description of substitutions, R-groups and preferred embodiments
  MOD_RES (11)..(12): Any L- or D-natural amino acid and any non-natural amino acid; see specification as filed for detailed description of substitutions, R-groups and preferred embodiments
  MOD_RES (18)..(21): Any L- or D-natural or non-natural amino acid, and this range may encompass 1 or 4 residues; see specification as filed for detailed description of substitutions, R-groups and preferred embodiments
  c-term may be amidated
VPLXRTVRXTXXSISNQXXXXKAIKNLLKAVSKE

SEQ ID NO: 418 - protein, 34 aa, Artificial Sequence
  Description of Artificial Sequence: Synthetic peptide
  MOD_RES (5)..(5): Any L- or D-natural amino acid and any non-natural amino acid; see specification as filed for detailed description of substitutions, R-groups and preferred embodiments
  MOD_RES (9)..(9): Any L- or D-natural amino acid and any non-natural amino acid; see specification as filed for detailed description of substitutions, R-groups and preferred embodiments
  MOD_RES (11)..(12): Any L- or D-natural amino acid and any non-natural amino acid; see specification as filed for detailed description of substitutions, R-groups and preferred embodiments
  MOD_RES (18)..(21): Any L- or D-natural or non-natural amino acid, and this range may encompass 1 or 4 residues; see specification as filed for detailed description of substitutions, R-groups and preferred embodiments
  c-term may be amidated
VPLSXTVRXTXXSISNQXXXXKAIKNLLKAVSKE

SEQ ID NO: 419 - protein, 34 aa, Artificial Sequence
  Description of Artificial Sequence: Synthetic peptide
  MOD_RES (6)..(6): Any L- or D-natural amino acid and any non-natural amino acid; see specification as filed for detailed description of substitutions, R-groups and preferred embodiments
  MOD_RES (9)..(9): Any L- or D-natural amino acid and any non-natural amino acid; see specification as filed for detailed description of substitutions, R-groups and preferred embodiments
  MOD_RES (11)..(12): Any L- or D-natural amino acid and any non-natural amino acid; see specification as filed for detailed description of substitutions, R-groups and preferred embodiments
  MOD_RES (18)..(21): Any L- or D-natural or non-natural amino acid, and this range may encompass 1 or 4 residues; see specification as filed for detailed description of substitutions, R-groups and preferred embodiments
  c-term may be amidated
VPLSRXVRXTXXSISNQXXXXKAIKNLLKAVSKE

SEQ ID NO: 420 - protein, 34 aa, Artificial Sequence
  Description of Artificial Sequence: Synthetic peptide
  MOD_RES (7)..(7): Any L- or D-natural amino acid and any non-natural amino acid; see specification as filed for detailed description of substitutions, R-groups and preferred embodiments
  MOD_RES (9)..(9): Any L- or D-natural amino acid and any non-natural amino acid; see specification as filed for detailed description of substitutions, R-groups and preferred embodiments
  MOD_RES (11)..(12): Any L- or D-natural amino acid and any non-natural amino acid; see specification as filed for detailed description of substitutions, R-groups and preferred embodiments
  MOD_RES (18)..(21): Any L- or D-natural or non-natural amino acid, and this range may encompass 1 or 4 residues; see specification as filed for detailed description of substitutions, R-groups and preferred embodiments
  c-term may be amidated
VPLSRTXRXTXXSISNQXXXXKAIKNLLKAVSKE

SEQ ID NO: 421 - protein, 34 aa, Artificial Sequence
  Description of Artificial Sequence: Synthetic peptide
  MOD_RES (8)..(9): Any L- or D-natural amino acid and any non-natural amino acid; see specification as filed for detailed description of substitutions, R-groups and preferred embodiments
  MOD_RES (11)..(12): Any L- or D-natural amino acid and any non-natural amino acid; see specification as filed for detailed description of substitutions, R-groups and preferred embodiments
  MOD_RES (18)..(21): Any L- or D-natural or non-natural amino acid, and this range may encompass 1 or 4 residues; see specification as filed for detailed description of substitutions, R-groups and preferred embodiments
  c-term may be amidated
VPLSRTVXXTXXSISNQXXXXKAIKNLLKAVSKE

SEQ ID NO: 422 - protein, 34 aa, Artificial Sequence
  Description of Artificial Sequence: Synthetic peptide
  MOD_RES (13)..(13): Any L- or D-natural amino acid and any non-natural amino acid; see specification as filed for detailed description of substitutions, R-groups and preferred embodiments
  MOD_RES (18)..(21): Any L- or D-natural or non-natural amino acid, and this range may encompass 1 or 4 residues; see specification as filed for detailed description of substitutions, R-groups and preferred embodiments
  c-term may be amidated
VPLSRTVRCTCIXISNQXXXXKAIKNLLKAVSKE

SEQ ID NO: 423 - protein, 34 aa, Artificial Sequence
  Description of Artificial Sequence: Synthetic peptide
  MOD_RES (1)..(1): Any L- or D-natural amino acid and any non-natural amino acid; see specification as filed for detailed description of substitutions, R-groups and preferred embodiments
  MOD_RES (9)..(9): Any L- or D-natural amino acid and any non-natural amino acid; see specification as filed for detailed description of substitutions, R-groups and preferred embodiments
  MOD_RES (11)..(11): Any L- or D-natural amino acid and any non-natural amino acid; see specification as filed for detailed description of substitutions, R-groups and preferred embodiments
  MOD_RES (13)..(13): Any L- or D-natural amino acid and any non-natural amino acid; see specification as filed for detailed description of substitutions, R-groups and preferred embodiments
  MOD_RES (18)..(21): Any L- or D-natural or non-natural amino acid, and this range may encompass 1 or 4 residues; see specification as filed for detailed description of substitutions, R-groups and preferred embodiments
  c-term may be amidated
XPLSRTVRXTXIXISNQXXXXKAIKNLLKAVSKE

SEQ ID NO: 424 - protein, 34 aa, Artificial Sequence
  Description of Artificial Sequence: Synthetic peptide
  MOD_RES (2)..(2): Any L- or D-natural amino acid and any non-natural amino acid; see specification as filed for detailed description of substitutions, R-groups and preferred embodiments
  MOD_RES (9)..(9): Any L- or D-natural amino acid and any non-natural amino acid; see specification as filed for detailed description of substitutions, R-groups and preferred embodiments
  MOD_RES (11)..(11): Any L- or D-natural amino acid and any non-natural amino acid; see specification as filed for detailed description of substitutions, R-groups and preferred embodiments
  MOD_RES (13)..(13): Any L- or D-natural amino acid and any non-natural amino acid; see specification as filed for detailed description of substitutions, R-groups and preferred embodiments
  MOD_RES (18)..(21): Any L- or D-natural or non-natural amino acid, and this range may encompass 1 or 4 residues; see specification as filed for detailed description of substitutions, R-groups and preferred embodiments
  c-term may be amidated
VXLSRTVRXTXIXISNQXXXXKAIKNLLKAVSKE

SEQ ID NO: 425 - protein, 34 aa, Artificial Sequence
  Description of Artificial Sequence: Synthetic peptide
  MOD_RES (3)..(3): Any L- or D-natural amino acid and any non-natural amino acid; see specification as filed for detailed description of substitutions, R-groups and preferred embodiments
  MOD_RES (9)..(9): Any L- or D-natural amino acid and any non-natural amino acid; see specification as filed for detailed description of substitutions, R-groups and preferred embodiments
  MOD_RES (11)..(11): Any L- or D-natural amino acid and any non-natural amino acid; see specification as filed for detailed description of substitutions, R-groups and preferred embodiments
  MOD_RES (13)..(13): Any L- or D-natural amino acid and any non-natural amino acid; see specification as filed for detailed description of substitutions, R-groups and preferred embodiments
  MOD_RES (18)..(21): Any L- or D-natural or non-natural amino acid, and this range may encompass 1 or 4 residues; see specification as filed for detailed description of substitutions, R-groups and preferred embodiments
  c-term may be amidated
VPXSRTVRXTXIXISNQXXXXKAIKNLLKAVSKE

SEQ ID NO: 426 - protein, 34 aa, Artificial Sequence
  Description of Artificial Sequence: Synthetic peptide
  MOD_RES (4)..(4): Any L- or D-natural amino acid and any non-natural amino acid; see specification as filed for detailed description of substitutions, R-groups and preferred embodiments
  MOD_RES (9)..(9): Any L- or D-natural amino acid and any non-natural amino acid; see specification as filed for detailed description of substitutions, R-groups and preferred embodiments
  MOD_RES (11)..(11): Any L- or D-natural amino acid and any non-natural amino acid; see specification as filed for detailed description of substitutions, R-groups and preferred embodiments
  MOD_RES (13)..(13): Any L- or D-natural amino acid and any non-natural amino acid; see specification as filed for detailed description of substitutions, R-groups and preferred embodiments
  MOD_RES (18)..(21): Any L- or D-natural or non-natural amino acid, and this range may encompass 1 or 4 residues; see specification as filed for detailed description of substitutions, R-groups and preferred embodiments
  c-term may be amidated
VPLXRTVRXTXIXISNQXXXXKAIKNLLKAVSKE

SEQ ID NO: 427 - protein, 34 aa, Artificial Sequence
  Description of Artificial Sequence: Synthetic peptide
  MOD_RES (5)..(5): Any L- or D-natural amino acid and any non-natural amino acid; see specification as filed for detailed description of substitutions, R-groups and preferred embodiments
  MOD_RES (9)..(9): Any L- or D-natural amino acid and any non-natural amino acid; see specification as filed for detailed description of substitutions, R-groups and preferred embodiments
  MOD_RES (11)..(11): Any L- or D-natural amino acid and any non-natural amino acid; see specification as filed for detailed description of substitutions, R-groups and preferred embodiments
  MOD_RES (13)..(13): Any L- or D-natural amino acid and any non-natural amino acid; see specification as filed for detailed description of substitutions, R-groups and preferred embodiments
  MOD_RES (18)..(21): Any L- or D-natural or non-natural amino acid, and this range may encompass 1 or 4 residues; see specification as filed for detailed description of substitutions, R-groups and preferred embodiments
  c-term may be amidated
VPLSXTVRXTXIXISNQXXXXKAIKNLLKAVSKE

SEQ ID NO: 428 - protein, 34 aa, Artificial Sequence
  Description of Artificial Sequence: Synthetic peptide
  MOD_RES (6)..(6): Any L- or D-natural amino acid and any non-natural amino acid; see specification as filed for detailed description of substitutions, R-groups and preferred embodiments
  MOD_RES (9)..(9): Any L- or D-natural amino acid and any non-natural amino acid; see specification as filed for detailed description of substitutions, R-groups and preferred embodiments
  MOD_RES (11)..(11): Any L- or D-natural amino acid and any non-natural amino acid; see specification as filed for detailed description of substitutions, R-groups and preferred embodiments
  MOD_RES (13)..(13): Any L- or D-natural amino acid and any non-natural amino acid; see specification as filed for detailed description of substitutions, R-groups and preferred embodiments
  MOD_RES (18)..(21): Any L- or D-natural or non-natural amino acid, and this range may encompass 1 or 4 residues; see specification as filed for detailed description of substitutions, R-groups and preferred embodiments
  c-term may be amidated
VPLSRXVRXTXIXISNQXXXXKAIKNLLKAVSKE

SEQ ID NO: 429 - protein, 34 aa, Artificial Sequence
  Description of Artificial Sequence: Synthetic peptide
  MOD_RES (7)..(7): Any L- or D-natural amino acid and any non-natural amino acid; see specification as filed for detailed description of substitutions, R-groups and preferred embodiments
  MOD_RES (9)..(9): Any L- or D-natural amino acid and any non-natural amino acid; see specification as filed for detailed description of substitutions, R-groups and preferred embodiments
  MOD_RES (11)..(11): Any L- or D-natural amino acid and any non-natural amino acid; see specification as filed for detailed description of substitutions, R-groups and preferred embodiments
  MOD_RES (13)..(13): Any L- or D-natural amino acid and any non-natural amino acid; see specification as filed for detailed description of substitutions, R-groups and preferred embodiments
  MOD_RES (18)..(21): Any L- or D-natural or non-natural amino acid, and this range may encompass 1 or 4 residues; see specification as filed for detailed description of substitutions, R-groups and preferred embodiments
  c-term may be amidated
VPLSRTXRXTXIXISNQXXXXKAIKNLLKAVSKE

SEQ ID NO: 430 - protein, 34 aa, Artificial Sequence
  Description of Artificial Sequence: Synthetic peptide
  MOD_RES (8)..(9): Any L- or D-natural amino acid and any non-natural amino acid; see specification as filed for detailed description of substitutions, R-groups and preferred embodiments
  MOD_RES (11)..(11): Any L- or D-natural amino acid and any non-natural amino acid; see specification as filed for detailed description of substitutions, R-groups and preferred embodiments
  MOD_RES (13)..(13): Any L- or D-natural amino acid and any non-natural amino acid; see specification as filed for detailed description of substitutions, R-groups and preferred embodiments
  MOD_RES (18)..(21): Any L- or D-natural or non-natural amino acid, and this range may encompass 1 or 4 residues; see specification as filed for detailed description of substitutions, R-groups and preferred embodiments
  c-term may be amidated
VPLSRTVXXTXIXISNQXXXXKAIKNLLKAVSKE

SEQ ID NO: 431 - protein, 34 aa, Artificial Sequence
  Description of Artificial Sequence: Synthetic peptide
  MOD_RES (14)..(14): Any L- or D-natural amino acid and any non-natural amino acid; see specification as filed for detailed description of substitutions, R-groups and preferred embodiments
  MOD_RES (18)..(21): Any L- or D-natural or non-natural amino acid, and this range may encompass 1 or 4 residues; see specification as filed for detailed description of substitutions, R-groups and preferred embodiments
  c-term may be amidated
VPLSRTVRCTCISXSNQXXXXKAIKNLLKAVSKE

SEQ ID NO: 432 - protein, 34 aa, Artificial Sequence
  Description of Artificial Sequence: Synthetic peptide
  MOD_RES (1)..(1): Any L- or D-natural amino acid and any non-natural amino acid; see specification as filed for detailed description of substitutions, R-groups and preferred embodiments
  MOD_RES (9)..(9): Any L- or D-natural amino acid and any non-natural amino acid; see specification as filed for detailed description of substitutions, R-groups and preferred embodiments
  MOD_RES (11)..(11): Any L- or D-natural amino acid and any non-natural amino acid; see specification as filed for detailed description of substitutions, R-groups and preferred embodiments
  MOD_RES (14)..(14): Any L- or D-natural amino acid and any non-natural amino acid; see specification as filed for detailed description of substitutions, R-groups and preferred embodiments
  MOD_RES (18)..(21): Any L- or D-natural or non-natural amino acid, and this range may encompass 1 or 4 residues; see specification as filed for detailed description of substitutions, R-groups and preferred embodiments
  c-term may be amidated
XPLSRTVRXTXISXSNQXXXXKAIKNLLKAVSKE

SEQ ID NO: 433 - protein, 34 aa, Artificial Sequence
  Description of Artificial Sequence: Synthetic peptide
  MOD_RES (2)..(2): Any L- or D-natural amino acid and any non-natural amino acid; see specification as filed for detailed description of substitutions, R-groups and preferred embodiments
  MOD_RES (9)..(9): Any L- or D-natural amino acid and any non-natural amino acid; see specification as filed for detailed description of substitutions, R-groups and preferred embodiments
  MOD_RES (11)..(11): Any L- or D-natural amino acid and any non-natural amino acid; see specification as filed for detailed description of substitutions, R-groups and preferred embodiments
  MOD_RES (14)..(14): Any L- or D-natural amino acid and any non-natural amino acid; see specification as filed for detailed description of substitutions, R-groups and preferred embodiments
  MOD_RES (18)..(21): Any L- or D-natural or non-natural amino acid, and this range may encompass 1 or 4 residues; see specification as filed for detailed description of substitutions, R-groups and preferred embodiments
  c-term may be amidated
VXLSRTVRXTXISXSNQXXXXKAIKNLLKAVSKE

SEQ ID NO: 434 - protein, 34 aa, Artificial Sequence
  Description of Artificial Sequence: Synthetic peptide
  MOD_RES (3)..(3): Any L- or D-natural amino acid and any non-natural amino acid; see specification as filed for detailed description of substitutions, R-groups and preferred embodiments
  MOD_RES (9)..(9): Any L- or D-natural amino acid and any non-natural amino acid; see specification as filed for detailed description of substitutions, R-groups and preferred embodiments
  MOD_RES (11)..(11): Any L- or D-natural amino acid and any non-natural amino acid; see specification as filed for detailed description of substitutions, R-groups and preferred embodiments
  MOD_RES (14)..(14): Any L- or D-natural amino acid and any non-natural amino acid; see specification as filed for detailed description of substitutions, R-groups and preferred embodiments
  MOD_RES (18)..(21): Any L- or D-natural or non-natural amino acid, and this range may encompass 1 or 4 residues; see specification as filed for detailed description of substitutions, R-groups and preferred embodiments
  c-term may be amidated
VPXSRTVRXTXISXSNQXXXXKAIKNLLKAVSKE

SEQ ID NO: 435 - protein, 34 aa, Artificial Sequence
  Description of Artificial Sequence: Synthetic peptide
  MOD_RES (4)..(4): Any L- or D-natural amino acid and any non-natural amino acid; see specification as filed for detailed description of substitutions, R-groups and preferred embodiments
  MOD_RES (9)..(9): Any L- or D-natural amino acid and any non-natural amino acid; see specification as filed for detailed description of substitutions, R-groups and preferred embodiments
  MOD_RES (11)..(11): Any L- or D-natural amino acid and any non-natural amino acid; see specification as filed for detailed description of substitutions, R-groups and preferred embodiments
  MOD_RES (14)..(14): Any L- or D-natural amino acid and any non-natural amino acid; see specification as filed for detailed description of substitutions, R-groups and preferred embodiments
  MOD_RES (18)..(21): Any L- or D-natural or non-natural amino acid, and this range may encompass 1 or 4 residues; see specification as filed for detailed description of substitutions, R-groups and preferred embodiments
  c-term may be amidated
VPLXRTVRXTXISXSNQXXXXKAIKNLLKAVSKE

SEQ ID NO: 436 - protein, 34 aa, Artificial Sequence
  Description of Artificial Sequence: Synthetic peptide
  MOD_RES (5)..(5): Any L- or D-natural amino acid and any non-natural amino acid; see specification as filed for detailed description of substitutions, R-groups and preferred embodiments
  MOD_RES (9)..(9): Any L- or D-natural amino acid and any non-natural amino acid; see specification as filed for detailed description of substitutions, R-groups and preferred embodiments
  MOD_RES (11)..(11): Any L- or D-natural amino acid and any non-natural amino acid; see specification as filed for detailed description of substitutions, R-groups and preferred embodiments
  MOD_RES (14)..(14): Any L- or D-natural amino acid and any non-natural amino acid; see specification as filed for detailed description of substitutions, R-groups and preferred embodiments
  MOD_RES (18)..(21): Any L- or D-natural or non-natural amino acid, and this range may encompass 1 or 4 residues; see specification as filed for detailed description of substitutions, R-groups and preferred embodiments
  c-term may be amidated
VPLSXTVRXTXISXSNQXXXXKAIKNLLKAVSKE

SEQ ID NO: 437 - protein, 34 aa, Artificial Sequence
  Description of Artificial Sequence: Synthetic peptide
  MOD_RES (6)..(6): Any L- or D-natural amino acid and any non-natural amino acid; see specification as filed for detailed description of substitutions, R-groups and preferred embodiments
  MOD_RES (9)..(9): Any L- or D-natural amino acid and any non-natural amino acid; see specification as filed for detailed description of substitutions, R-groups and preferred embodiments
  MOD_RES (11)..(11): Any L- or D-natural amino acid and any non-natural amino acid; see specification as filed for detailed description of substitutions, R-groups and preferred embodiments
  MOD_RES (14)..(14): Any L- or D-natural amino acid and any non-natural amino acid; see specification as filed for detailed description of substitutions, R-groups and preferred embodiments
  MOD_RES (18)..(21): Any L- or D-natural or non-natural amino acid, and this range may encompass 1 or 4 residues; see specification as filed for detailed description of substitutions, R-groups and preferred embodiments
  c-term may be amidated
VPLSRXVRXTXISXSNQXXXXKAIKNLLKAVSKE

SEQ ID NO: 438 - protein, 34 aa, Artificial Sequence
  Description of Artificial Sequence: Synthetic peptide
  MOD_RES (7)..(7): Any L- or D-natural amino acid and any non-natural amino acid; see specification as filed for detailed description of substitutions, R-groups and preferred embodiments
  MOD_RES (9)..(9): Any L- or D-natural amino acid and any non-natural amino acid; see specification as filed for detailed description of substitutions, R-groups and preferred embodiments
  MOD_RES (11)..(11): Any L- or D-natural amino acid and any non-natural amino acid; see specification as filed for detailed description of substitutions, R-groups and preferred embodiments
  MOD_RES (14)..(14): Any L- or D-natural amino acid and any non-natural amino acid; see specification as filed for detailed description of substitutions, R-groups and preferred embodiments
  MOD_RES (18)..(21): Any L- or D-natural or non-natural amino acid, and this range may encompass 1 or 4 residues; see specification as filed for detailed description of substitutions, R-groups and preferred embodiments
  c-term may be amidated
VPLSRTXRXTXISXSNQXXXXKAIKNLLKAVSKE

SEQ ID NO: 439 - protein, 34 aa, Artificial Sequence
  Description of Artificial Sequence: Synthetic peptide
  MOD_RES (8)..(9): Any L- or D-natural amino acid and any non-natural amino acid; see specification as filed for detailed description of substitutions, R-groups and preferred embodiments
  MOD_RES (11)..(11): Any L- or D-natural amino acid and any non-natural amino acid; see specification as filed for detailed description of substitutions, R-groups and preferred embodiments
  MOD_RES (14)..(14): Any L- or D-natural amino acid and any non-natural amino acid; see specification as filed for detailed description of substitutions, R-groups and preferred embodiments
  MOD_RES (18)..(21): Any L- or D-natural or non-natural amino acid, and this range may encompass 1 or 4 residues; see specification as filed for detailed description of substitutions, R-groups and preferred embodiments
  c-term may be amidated
VPLSRTVXXTXISXSNQXXXXKAIKNLLKAVSKE

SEQ ID NO: 440 - protein, 34 aa, Artificial Sequence
  Description of Artificial Sequence: Synthetic peptide
  MOD_RES (16)..(16): Any L- or D-natural amino acid and any non-natural amino acid; see specification as filed for detailed description of substitutions, R-groups and preferred embodiments
  MOD_RES (18)..(21): Any L- or D-natural or non-natural amino acid, and this range may encompass 1 or 4 residues; see specification as filed for detailed description of substitutions, R-groups and preferred embodiments
  c-term may be amidated
VPLSRTVRCTCISISXQXXXXKAIKNLLKAVSKE

SEQ ID NO: 441 - protein, 34 aa, Artificial Sequence
  Description of Artificial Sequence: Synthetic peptide
  MOD_RES (1)..(1): Any L- or D-natural amino acid and any non-natural amino acid; see specification as filed for detailed description of substitutions, R-groups and preferred embodiments
  MOD_RES (9)..(9): Any L- or D-natural amino acid and any non-natural amino acid; see specification as filed for detailed description of substitutions, R-groups and preferred embodiments
  MOD_RES (11)..(11): Any L- or D-natural amino acid and any non-natural amino acid; see specification as filed for detailed description of substitutions, R-groups and preferred embodiments
  MOD_RES (16)..(16): Any L- or D-natural amino acid and any non-natural amino acid; see specification as filed for detailed description of substitutions, R-groups and preferred embodiments
  MOD_RES (18)..(21): Any L- or D-natural or non-natural amino acid, and this range may encompass 1 or 4 residues; see specification as filed for detailed description of substitutions, R-groups and preferred embodiments
  c-term may be amidated
XPLSRTVRXTXISISXQXXXXKAIKNLLKAVSKE

SEQ ID NO: 442 - protein, 34 aa, Artificial Sequence
  Description of Artificial Sequence: Synthetic peptide
  MOD_RES (2)..(2): Any L- or D-natural amino acid and any non-natural amino acid; see specification as filed for detailed description of substitutions, R-groups and preferred embodiments
  MOD_RES (9)..(9): Any L- or D-natural amino acid and any non-natural amino acid; see specification as filed for detailed description of substitutions, R-groups and preferred embodiments
  MOD_RES (11)..(11): Any L- or D-natural amino acid and any non-natural amino acid; see specification as filed for detailed description of substitutions, R-groups and preferred embodiments
  MOD_RES (16)..(16): Any L- or D-natural amino acid and any non-natural amino acid; see specification as filed for detailed description of substitutions, R-groups and preferred embodiments
  MOD_RES (18)..(21): Any L- or D-natural or non-natural amino acid, and this range may encompass 1 or 4 residues; see specification as filed for detailed description of substitutions, R-groups and preferred embodiments
  c-term may be amidated
VXLSRTVRXTXISISXQXXXXKAIKNLLKAVSKE

SEQ ID NO: 443 - protein, 34 aa, Artificial Sequence
  Description of Artificial Sequence: Synthetic peptide
  MOD_RES (3)..(3): Any L- or D-natural amino acid and any non-natural amino acid; see specification as filed for detailed description of substitutions, R-groups and preferred embodiments
  MOD_RES (9)..(9): Any L- or D-natural amino acid and any non-natural amino acid; see specification as filed for detailed description of substitutions, R-groups and preferred embodiments
  MOD_RES (11)..(11): Any L- or D-natural amino acid and any non-natural amino acid; see specification as filed for detailed description of substitutions, R-groups and preferred embodiments
  MOD_RES (16)..(16): Any L- or D-natural amino acid and any non-natural amino acid; see specification as filed for detailed description of substitutions, R-groups and preferred embodiments
  MOD_RES (18)..(21): Any L- or D-natural or non-natural amino acid, and this range may encompass 1 or 4 residues; see specification as filed for detailed description of substitutions, R-groups and preferred embodiments
  c-term may be amidated
VPXSRTVRXTXISISXQXXXXKAIKNLLKAVSKE

SEQ ID NO: 444 - protein, 34 aa, Artificial Sequence
  Description of Artificial Sequence: Synthetic peptide
  MOD_RES (4)..(4): Any L- or D-natural amino acid and any non-natural amino acid; see specification as filed for detailed description of substitutions, R-groups and preferred embodiments
  MOD_RES (9)..(9): Any L- or D-natural amino acid and any non-natural amino acid; see specification as filed for detailed description of substitutions, R-groups and preferred embodiments
  MOD_RES (11)..(11): Any L- or D-natural amino acid and any non-natural amino acid; see specification as filed for detailed description of substitutions, R-groups and preferred embodiments
  MOD_RES (16)..(16): Any L- or D-natural amino acid and any non-natural amino acid; see specification as filed for detailed description of substitutions, R-groups and preferred embodiments
  MOD_RES (18)..(21): Any L- or D-natural or non-natural amino acid, and this range may encompass 1 or 4 residues; see specification as filed for detailed description of substitutions, R-groups and preferred embodiments
  c-term may be amidated
VPLXRTVRXTXISISXQXXXXKAIKNLLKAVSKE

SEQ ID NO: 445 - protein, 34 aa, Artificial Sequence
  Description of Artificial Sequence: Synthetic peptide
  MOD_RES (5)..(5): Any L- or D-natural amino acid and any non-natural amino acid; see specification as filed for detailed description of substitutions, R-groups and preferred embodiments
  MOD_RES (9)..(9): Any L- or D-natural amino acid and any non-natural amino acid; see specification as filed for detailed description of substitutions, R-groups and preferred embodiments
  MOD_RES (11)..(11): Any L- or D-natural amino acid and any non-natural amino acid; see specification as filed for detailed description of substitutions, R-groups and preferred embodiments
  MOD_RES (16)..(16): Any L- or D-natural amino acid and any non-natural amino acid; see specification as filed for detailed description of substitutions, R-groups and preferred embodiments
  MOD_RES (18)..(21): Any L- or D-natural or non-natural amino acid, and this range may encompass 1 or 4 residues; see specification as filed for detailed description of substitutions, R-groups and preferred embodiments
  c-term may be amidated
VPLSXTVRXTXISISXQXXXXKAIKNLLKAVSKE

SEQ ID NO: 446 - protein, 34 aa, Artificial Sequence
  Description of Artificial Sequence: Synthetic peptide
  MOD_RES (6)..(6): Any L- or D-natural amino acid and any non-natural amino acid; see specification as filed for detailed description of substitutions, R-groups and preferred embodiments
  MOD_RES (9)..(9): Any L- or D-natural amino acid and any non-natural amino acid; see specification as filed for detailed description of substitutions, R-groups and preferred embodiments
  MOD_RES (11)..(11): Any L- or D-natural amino acid and any non-natural amino acid; see specification as filed for detailed description of substitutions, R-groups and preferred embodiments
  MOD_RES (16)..(16): Any L- or D-natural amino acid and any non-natural amino acid; see specification as filed for detailed description of substitutions, R-groups and preferred embodiments
  MOD_RES (18)..(21): Any L- or D-natural or non-natural amino acid, and this range may encompass 1 or 4 residues; see specification as filed for detailed description of substitutions, R-groups and preferred embodiments
  c-term may be amidated
VPLSRXVRXTXISISXQXXXXKAIKNLLKAVSKE

SEQ ID NO: 447 - protein, 34 aa, Artificial Sequence
  Description of Artificial Sequence: Synthetic peptide
  MOD_RES (7)..(7): Any L- or D-natural amino acid and any non-natural amino acid; see specification as filed for detailed description of substitutions, R-groups and preferred embodiments
  MOD_RES (9)..(9): Any L- or D-natural amino acid and any non-natural amino acid; see specification as filed for detailed description of substitutions, R-groups and preferred embodiments
  MOD_RES (11)..(11): Any L- or D-natural amino acid and any non-natural amino acid; see specification as filed for detailed description of substitutions, R-groups and preferred embodiments
  MOD_RES (16)..(16): Any L- or D-natural amino acid and any non-natural amino acid; see specification as filed for detailed description of substitutions, R-groups and preferred embodiments
  MOD_RES (18)..(21): Any L- or D-natural or non-natural amino acid, and this range may encompass 1 or 4 residues; see specification as filed for detailed description of substitutions, R-groups and preferred embodiments
  c-term may be amidated
VPLSRTXRXTXISISXQXXXXKAIKNLLKAVSKE

SEQ ID NO: 448 - protein, 34 aa, Artificial Sequence
  Description of Artificial Sequence: Synthetic peptide
  MOD_RES (8)..(9): Any L- or D-natural amino acid and any non-natural amino acid; see specification as filed for detailed description of substitutions, R-groups and preferred embodiments
  MOD_RES (11)..(11): Any L- or D-natural amino acid and any non-natural amino acid; see specification as filed for detailed description of substitutions, R-groups and preferred embodiments
  MOD_RES (16)..(16): Any L- or D-natural amino acid and any non-natural amino acid; see specification as filed for detailed description of substitutions, R-groups and preferred embodiments
  MOD_RES (18)..(21): Any L- or D-natural or non-natural amino acid, and this range may encompass 1 or 4 residues; see specification as filed for detailed description of substitutions, R-groups and preferred embodiments
  c-term may be amidated
VPLSRTVXXTXISISXQXXXXKAIKNLLKAVSKE

SEQ ID NO: 449 - protein, 34 aa, Artificial Sequence
  Description of Artificial Sequence: Synthetic peptide
  MOD_RES (17)..(17): Any L- or D-natural amino acid and any non-natural amino acid; see specification as filed for detailed description of substitutions, R-groups and preferred embodiments
  MOD_RES (18)..(21): Any L- or D-natural or non-natural amino acid, and this range may encompass 1 or 4 residues; see specification as filed for detailed description of substitutions, R-groups and preferred embodiments
  c-term may be amidated
VPLSRTVRCTCISISQXXXXXKAIKNLLKAVSKE

SEQ ID NO: 450 - protein, 34 aa, Artificial Sequence
  Description of Artificial Sequence: Synthetic peptide
  MOD_RES (1)..(1): Any L- or D-natural amino acid and any non-natural amino acid; see specification as filed for detailed description of substitutions, R-groups and preferred embodiments
  MOD_RES (9)..(9): Any L- or D-natural amino acid and any non-natural amino acid; see specification as filed for detailed description of substitutions, R-groups and preferred embodiments
  MOD_RES (11)..(11): Any L- or D-natural amino acid and any non-natural amino acid; see specification as filed for detailed description of substitutions, R-groups and preferred embodiments
  MOD_RES (17)..(17): Any L- or D-natural amino acid and any non-natural amino acid; see specification as filed for detailed description of substitutions, R-groups and preferred embodiments
  MOD_RES (18)..(21): Any L- or D-natural or non-natural amino acid, and this range may encompass 1 or 4 residues; see specification as filed for detailed description of substitutions, R-groups and preferred embodiments
  c-term may be amidated
XPLSRTVRXTXISISQXXXXXKAIKNLLKAVSKE

SEQ ID NO: 451 - protein, 34 aa, Artificial Sequence
  Description of Artificial Sequence: Synthetic peptide
  MOD_RES (2)..(2): Any L- or D-natural amino acid and any non-natural amino acid; see specification as filed for detailed description of substitutions, R-groups and preferred embodiments
  MOD_RES (9)..(9): Any L- or D-natural amino acid and any non-natural amino acid; see specification as filed for detailed description of substitutions, R-groups and preferred embodiments
  MOD_RES (11)..(11): Any L- or D-natural amino acid and any non-natural amino acid; see specification as filed for detailed description of substitutions, R-groups and preferred embodiments
  MOD_RES (17)..(17): Any L- or D-natural amino acid and any non-natural amino acid; see specification as filed for detailed description of substitutions, R-groups and preferred embodiments
  MOD_RES (18)..(21): Any L- or D-natural or non-natural amino acid, and this range may encompass 1 or 4 residues; see specification as filed for detailed description of substitutions, R-groups and preferred embodiments
  c-term may be amidated
VXLSRTVRXTXISISQXXXXXKAIKNLLKAVSKE

SEQ ID NO: 452 - protein, 34 aa, Artificial Sequence
  Description of Artificial Sequence: Synthetic peptide
  MOD_RES (3)..(3): Any L- or D-natural amino acid and any non-natural amino acid; see specification as filed for detailed description of substitutions, R-groups and preferred embodiments
  MOD_RES (9)..(9): Any L- or D-natural amino acid and any non-natural amino acid; see specification as filed for detailed description of substitutions, R-groups and preferred embodiments
  MOD_RES (11)..(11): Any L- or D-natural amino acid and any non-natural amino acid; see specification as filed for detailed description of substitutions, R-groups and preferred embodiments
  MOD_RES (17)..(17): Any L- or D-natural amino acid and any non-natural amino acid; see specification as filed for detailed description of substitutions, R-groups and preferred embodiments
  MOD_RES (18)..(21): Any L- or D-natural or non-natural amino acid, and this range may encompass 1 or 4 residues; see specification as filed for detailed description of substitutions, R-groups and preferred embodiments
  c-term may be amidated
VPXSRTVRXTXISISQXXXXXKAIKNLLKAVSKE

SEQ ID NO: 453 - protein, 34 aa, Artificial Sequence
  Description of Artificial Sequence: Synthetic peptide
  MOD_RES (4)..(4): Any L- or D-natural amino acid and any non-natural amino acid; see specification as filed for detailed description of substitutions, R-groups and preferred embodiments
  MOD_RES (9)..(9): Any L- or D-natural amino acid and any non-natural amino acid; see specification as filed for detailed description of substitutions, R-groups and preferred embodiments
  MOD_RES (11)..(11): Any L- or D-natural amino acid and any non-natural amino acid; see specification as filed for detailed description of substitutions, R-groups and preferred embodiments
  MOD_RES (17)..(17): Any L- or D-natural amino acid and any non-natural amino acid; see specification as filed for detailed description of substitutions, R-groups and preferred embodiments
  MOD_RES (18)..(21): Any L- or D-natural or non-natural amino acid, and this range may encompass 1 or 4 residues; see specification as filed for detailed description of substitutions, R-groups and preferred embodiments
  c-term may be amidated
VPLXRTVRXTXISISQXXXXXKAIKNLLKAVSKE

SEQ ID NO: 454 - protein, 34 aa, Artificial Sequence
  Description of Artificial Sequence: Synthetic peptide
  MOD_RES (5)..(5): Any L- or D-natural amino acid and any non-natural amino acid; see specification as filed for detailed description of substitutions, R-groups and preferred embodiments
  MOD_RES (9)..(9): Any L- or D-natural amino acid and any non-natural amino acid; see specification as filed for detailed description of substitutions, R-groups and preferred embodiments
  MOD_RES (11)..(11): Any L- or D-natural amino acid and any non-natural amino acid; see specification as filed for detailed description of substitutions, R-groups and preferred embodiments
  MOD_RES (17)..(17): Any L- or D-natural amino acid and any non-natural amino acid; see specification as filed for detailed description of substitutions, R-groups and preferred embodiments
  MOD_RES (18)..(21): Any L- or D-natural or non-natural amino acid, and this range may encompass 1 or 4 residues; see specification as filed for detailed description of substitutions, R-groups and preferred embodiments
  c-term may be amidated
VPLSXTVRXTXISISQXXXXXKAIKNLLKAVSKE

SEQ ID NO: 455 - protein, 34 aa, Artificial Sequence
  Description of Artificial Sequence: Synthetic peptide
  MOD_RES (6)..(6): Any L- or D-natural amino acid and any non-natural amino acid; see specification as filed for detailed description of substitutions, R-groups and preferred embodiments
  MOD_RES (9)..(9): Any L- or D-natural amino acid and any non-natural amino acid; see specification as filed for detailed description of substitutions, R-groups and preferred embodiments
  MOD_RES (11)..(11): Any L- or D-natural amino acid and any non-natural amino acid; see specification as filed for detailed description of substitutions, R-groups and preferred embodiments
  MOD_RES (17)..(17): Any L- or D-natural amino acid and any non-natural amino acid; see specification as filed for detailed description of substitutions, R-groups and preferred embodiments
  MOD_RES (18)..(21): Any L- or D-natural or non-natural amino acid, and this range may encompass 1 or 4 residues; see specification as filed for detailed description of substitutions, R-groups and preferred embodiments
  c-term may be amidated
VPLSRXVRXTXISISQXXXXXKAIKNLLKAVSKE

SEQ ID NO: 456 - protein, 34 aa, Artificial Sequence
  Description of Artificial Sequence: Synthetic peptide
  MOD_RES (7)..(7): Any L- or D-natural amino acid and any non-natural amino acid; see specification as filed for detailed description of substitutions, R-groups and preferred embodiments
  MOD_RES (9)..(9): Any L- or D-natural amino acid and any non-natural amino acid; see specification as filed for detailed description of substitutions, R-groups and preferred embodiments
  MOD_RES (11)..(11): Any L- or D-natural amino acid and any non-natural amino acid; see specification as filed for detailed description of substitutions, R-groups and preferred embodiments
  MOD_RES (17)..(17): Any L- or D-natural amino acid and any non-natural amino acid; see specification as filed for detailed description of substitutions, R-groups and preferred embodiments
  MOD_RES (18)..(21): Any L- or D-natural or non-natural amino acid, and this range may encompass 1 or 4 residues; see specification as filed for detailed description of substitutions, R-groups and preferred embodiments
  c-term may be amidated
VPLSRTXRXTXISISQXXXXXKAIKNLLKAVSKE

SEQ ID NO: 457 - protein, 34 aa, Artificial Sequence
  Description of Artificial Sequence: Synthetic peptide
  MOD_RES (8)..(9): Any L- or D-natural amino acid and any non-natural amino acid; see specification as filed for detailed description of substitutions, R-groups and preferred embodiments
  MOD_RES (11)..(11): Any L- or D-natural amino acid and any non-natural amino acid; see specification as filed for detailed description of substitutions, R-groups and preferred embodiments
  MOD_RES (17)..(17): Any L- or D-natural amino acid and any non-natural amino acid; see specification as filed for detailed description of substitutions, R-groups and preferred embodiments
  MOD_RES (18)..(21): Any L- or D-natural or non-natural amino acid, and this range may encompass 1 or 4 residues; see specification as filed for detailed description of substitutions, R-groups and preferred embodiments
  c-term may be amidated
VPLSRTVXXTXISISQXXXXXKAIKNLLKAVSKE

SEQ ID NO: 458 - protein, 31 aa, Artificial Sequence; identical to SEQ ID NO: 188
  Description of Artificial Sequence: Synthetic peptide
  MOD_RES (15)..(18): Any L- or D-natural or non-natural amino acid, and this range may encompass 1 or 4 residues; see specification as filed for detailed description of substitutions, R-groups and preferred embodiments
  c-term may be amidated

SEQ ID NO: 459 - protein, 31 aa, Artificial Sequence; identical to SEQ ID NO: 189
  Description of Artificial Sequence: Synthetic peptide
  MOD_RES (1)..(1): Any L- or D-natural amino acid and any non-natural amino acid; see specification as filed for detailed description of substitutions, R-groups and preferred embodiments
  MOD_RES (9)..(9): Any L- or D-natural amino acid and any non-natural amino acid; see specification as filed for detailed description of substitutions, R-groups and preferred embodiments
  MOD_RES (11)..(11): Any L- or D-natural amino acid and any non-natural amino acid; see specification as filed for detailed description of substitutions, R-groups and preferred embodiments
  MOD_RES (15)..(18): Any L- or D-natural or non-natural amino acid, and this range may encompass 1 or 4 residues; see specification as filed for detailed description of substitutions, R-groups and preferred embodiments
  c-term may be amidated

SEQ ID NO: 460 - protein, 31 aa, Artificial Sequence; identical to SEQ ID NO: 190
  Description of Artificial Sequence: Synthetic peptide
  MOD_RES (2)..(2): Any L- or D-natural amino acid and any non-natural amino acid; see specification as filed for detailed description of substitutions, R-groups and preferred embodiments
  MOD_RES (9)..(9): Any L- or D-natural amino acid and any non-natural amino acid; see specification as filed for detailed description of substitutions, R-groups and preferred embodiments
  MOD_RES (11)..(11): Any L- or D-natural amino acid and any non-natural amino acid; see specification as filed for detailed description of substitutions, R-groups and preferred embodiments
  MOD_RES (15)..(18): Any L- or D-natural or non-natural amino acid, and this range may encompass 1 or 4 residues; see specification as filed for detailed description of substitutions, R-groups and preferred embodiments
  c-term may be amidated

SEQ ID NO: 461 - protein, 31 aa, Artificial Sequence; identical to SEQ ID NO: 191
  Description of Artificial Sequence: Synthetic peptide
  MOD_RES (3)..(3): Any L- or D-natural amino acid and any non-natural amino acid; see specification as filed for detailed description of substitutions, R-groups and preferred embodiments
  MOD_RES (9)..(9): Any L- or D-natural amino acid and any non-natural amino acid; see specification as filed for detailed description of substitutions, R-groups and preferred embodiments
  MOD_RES (11)..(11): Any L- or D-natural amino acid and any non-natural amino acid; see specification as filed for detailed description of substitutions, R-groups and preferred embodiments
  MOD_RES (15)..(18): Any L- or D-natural or non-natural amino acid, and this range may encompass 1 or 4 residues; see specification as filed for detailed description of substitutions, R-groups and preferred embodiments
  c-term may be amidated

SEQ ID NO: 462 - protein, 31 aa, Artificial Sequence; identical to SEQ ID NO: 192
  Description of Artificial Sequence: Synthetic peptide
  MOD_RES (4)..(4): Any L- or D-natural amino acid and any non-natural amino acid; see specification as filed for detailed description of substitutions, R-groups and preferred embodiments
  MOD_RES (9)..(9): Any L- or D-natural amino acid and any non-natural amino acid; see specification as filed for detailed description of substitutions, R-groups and preferred embodiments
  MOD_RES (11)..(11): Any L- or D-natural amino acid and any non-natural amino acid; see specification as filed for detailed description of substitutions, R-groups and preferred embodiments
  MOD_RES (15)..(18): Any L- or D-natural or non-natural amino acid, and this range may encompass 1 or 4 residues; see specification as filed for detailed description of substitutions, R-groups and preferred embodiments
  c-term may be amidated

SEQ ID NO: 463 - protein, 31 aa, Artificial Sequence; identical to SEQ ID NO: 193
  Description of Artificial Sequence: Synthetic peptide
  MOD_RES (5)..(5): Any L- or D-natural amino acid and any non-natural amino acid; see specification as filed for detailed description of substitutions, R-groups and preferred embodiments
  MOD_RES (9)..(9): Any L- or D-natural amino acid and any non-natural amino acid; see specification as filed for detailed description of substitutions, R-groups and preferred embodiments
  MOD_RES (11)..(11): Any L- or D-natural amino acid and any non-natural amino acid; see specification as filed for detailed description of substitutions, R-groups and preferred embodiments
  MOD_RES (15)..(18): Any L- or D-natural or non-natural amino acid, and this range may encompass 1 or 4 residues; see specification as filed for detailed description of substitutions, R-groups and preferred embodiments
  c-term may be amidated

SEQ ID NO: 464 - protein, 31 aa, Artificial Sequence; identical to SEQ ID NO: 194
  Description of Artificial Sequence: Synthetic peptide
  MOD_RES (6)..(6): Any L- or D-natural amino acid and any non-natural amino acid; see specification as filed for detailed description of substitutions, R-groups and preferred embodiments
  MOD_RES (9)..(9): Any L- or D-natural amino acid and any non-natural amino acid; see specification as filed for detailed description of substitutions, R-groups and preferred embodiments
  MOD_RES (11)..(11): Any L- or D-natural amino acid and any non-natural amino acid; see specification as filed for detailed description of substitutions, R-groups and preferred embodiments
  MOD_RES (15)..(18): Any L- or D-natural or non-natural amino acid, and this range may encompass 1 or 4 residues; see specification as filed for detailed description of substitutions, R-groups and preferred embodiments
  c-term may be amidated

SEQ ID NO: 465 - protein, 31 aa, Artificial Sequence; identical to SEQ ID NO: 195
  Description of Artificial Sequence: Synthetic peptide
  MOD_RES (7)..(7): Any L- or D-natural amino acid and any non-natural amino acid; see specification as filed for detailed description of substitutions, R-groups and preferred embodiments
  MOD_RES (9)..(9): Any L- or D-natural amino acid and any non-natural amino acid; see specification as filed for detailed description of substitutions, R-groups and preferred embodiments
  MOD_RES (11)..(11): Any L- or D-natural amino acid and any non-natural amino acid; see specification as filed for detailed description of substitutions, R-groups and preferred embodiments
  MOD_RES (15)..(18): Any L- or D-natural or non-natural amino acid, and this range may encompass 1 or 4 residues; see specification as filed for detailed description of substitutions, R-groups and preferred embodiments
  c-term may be amidated

SEQ ID NO: 466 - protein, 31 aa, Artificial Sequence; identical to SEQ ID NO: 196
  Description of Artificial Sequence: Synthetic peptide
  MOD_RES (8)..(9): Any L- or D-natural amino acid and any non-natural amino acid; see specification as filed for detailed description of substitutions, R-groups and preferred embodiments
  MOD_RES (11)..(11): Any L- or D-natural amino acid and any non-natural amino acid; see specification as filed for detailed description of substitutions, R-groups and preferred embodiments
  MOD_RES (15)..(18): Any L- or D-natural or non-natural amino acid, and this range may encompass 1 or 4 residues; see specification as filed for detailed description of substitutions, R-groups and preferred embodiments
  c-term may be amidated

SEQ ID NO: 467 - protein, 31 aa, Artificial Sequence; identical to SEQ ID NO: 197
  Description of Artificial Sequence: Synthetic peptide
  MOD_RES (12)..(12): Any L- or D-natural amino acid and any non-natural amino acid; see specification as filed for detailed description of substitutions, R-groups and preferred embodiments
  MOD_RES (15)..(18): Any L- or D-natural or non-natural amino acid, and this range may encompass 1 or 4 residues; see specification as filed for detailed description of substitutions, R-groups and preferred embodiments
  c-term may be amidated

SEQ ID NO: 468 - protein, 31 aa, Artificial Sequence; identical to SEQ ID NO: 198
  Description of Artificial Sequence: Synthetic peptide
  MOD_RES (1)..(1): Any L- or D-natural amino acid and any non-natural amino acid; see specification as filed for detailed description of substitutions, R-groups and preferred embodiments
  MOD_RES (9)..(9): Any L- or D-natural amino acid and any non-natural amino acid; see specification as filed for detailed description of substitutions, R-groups and preferred embodiments
  MOD_RES (11)..(12): Any L- or D-natural amino acid and any non-natural amino acid; see specification as filed for detailed description of substitutions, R-groups and preferred embodiments
  MOD_RES (15)..(18): Any L- or D-natural or non-natural amino acid, and this range may encompass 1 or 4 residues; see specification as filed for detailed description of substitutions, R-groups and preferred embodiments
  c-term may be amidated

SEQ ID NO: 469 - protein, 31 aa, Artificial Sequence; identical to SEQ ID NO: 199
  Description of Artificial Sequence: Synthetic peptide
  MOD_RES (2)..(2): Any L- or D-natural amino acid and any non-natural amino acid; see specification as filed for detailed description of substitutions, R-groups and preferred embodiments
  MOD_RES (9)..(9): Any L- or D-natural amino acid and any non-natural amino acid; see specification as filed for detailed description of substitutions, R-groups and preferred embodiments
  MOD_RES (11)..(12): Any L- or D-natural amino acid and any non-natural amino acid; see specification as filed for detailed description of substitutions, R-groups and preferred embodiments
  MOD_RES (15)..(18): Any L- or D-natural or non-natural amino acid, and this range may encompass 1 or 4 residues; see specification as filed for detailed description of substitutions, R-groups and preferred embodiments
  c-term may be amidated

SEQ ID NO: 470 - protein, 31 aa, Artificial Sequence; identical to SEQ ID NO: 200
  Description of Artificial Sequence: Synthetic peptide
  MOD_RES (3)..(3): Any L- or D-natural amino acid and any non-natural amino acid; see specification as filed for detailed description of substitutions, R-groups and preferred embodiments
  MOD_RES (9)..(9): Any L- or D-natural amino acid and any non-natural amino acid; see specification as filed for detailed description of substitutions, R-groups and preferred embodiments
  MOD_RES (11)..(12): Any L- or D-natural amino acid and any non-natural amino acid; see specification as filed for detailed description of substitutions, R-groups and preferred embodiments
  MOD_RES (15)..(18): Any L- or D-natural or non-natural amino acid, and this range may encompass 1 or 4 residues; see specification as filed for detailed description of substitutions, R-groups and preferred embodiments
  c-term may be amidated

SEQ ID NO: 471 - protein, 31 aa, Artificial Sequence; identical to SEQ ID NO: 201
  Description of Artificial Sequence: Synthetic peptide
  MOD_RES (4)..(4): Any L- or D-natural amino acid and any non-natural amino acid; see specification as filed for detailed description of substitutions, R-groups and preferred embodiments
  MOD_RES (9)..(9): Any L- or D-natural amino acid and any non-natural amino acid; see specification as filed for detailed description of substitutions, R-groups and preferred embodiments
  MOD_RES (11)..(12): Any L- or D-natural amino acid and any non-natural amino acid; see specification as filed for detailed description of substitutions, R-groups and preferred embodiments
  MOD_RES (15)..(18): Any L- or D-natural or non-natural amino acid, and this range may encompass 1 or 4 residues; see specification as filed for detailed description of substitutions, R-groups and preferred embodiments
  c-term may be amidated

SEQ ID NO: 472 - protein, 31 aa, Artificial Sequence; identical to SEQ ID NO: 202
  Description of Artificial Sequence: Synthetic peptide
  MOD_RES (5)..(5): Any L- or D-natural amino acid and any non-natural amino acid; see specification as filed for detailed description of substitutions, R-groups and preferred embodiments
  MOD_RES (9)..(9): Any L- or D-natural amino acid and any non-natural amino acid; see specification as filed for detailed description of substitutions, R-groups and preferred embodiments
  MOD_RES (11)..(12): Any L- or D-natural amino acid and any non-natural amino acid; see specification as filed for detailed description of substitutions, R-groups and preferred embodiments
  MOD_RES (15)..(18): Any L- or D-natural or non-natural amino acid, and this range may encompass 1 or 4 residues; see specification as filed for detailed description of substitutions, R-groups and preferred embodiments
  c-term may be amidated

SEQ ID NO: 473 - protein, 31 aa, Artificial Sequence; identical to SEQ ID NO: 203
  Description of Artificial Sequence: Synthetic peptide
  MOD_RES (6)..(6): Any L- or D-natural amino acid and any non-natural amino acid; see specification as filed for detailed description of substitutions, R-groups and preferred embodiments
  MOD_RES (9)..(9): Any L- or D-natural amino acid and any non-natural amino acid; see specification as filed for detailed description of substitutions, R-groups and preferred embodiments
  MOD_RES (11)..(12): Any L- or D-natural amino acid and any non-natural amino acid; see specification as filed for detailed description of substitutions, R-groups and preferred embodiments
  MOD_RES (15)..(18): Any L- or D-natural or non-natural amino acid, and this range may encompass 1 or 4 residues; see specification as filed for detailed description of substitutions, R-groups and preferred embodiments
  c-term may be amidated

SEQ ID NO: 474 - protein, 31 aa, Artificial Sequence; identical to SEQ ID NO: 204
  Description of Artificial Sequence: Synthetic peptide
  MOD_RES (7)..(7): Any L- or D-natural amino acid and any non-natural amino acid; see specification as filed for detailed description of substitutions, R-groups and preferred embodiments
  MOD_RES (9)..(9): Any L- or D-natural amino acid and any non-natural amino acid; see specification as filed for detailed description of substitutions, R-groups and preferred embodiments
  MOD_RES (11)..(12): Any L- or D-natural amino acid and any non-natural amino acid; see specification as filed for detailed description of substitutions, R-groups and preferred embodiments
  MOD_RES (15)..(18): Any L- or D-natural or non-natural amino acid, and this range may encompass 1 or 4 residues; see specification as filed for detailed description of substitutions, R-groups and preferred embodiments
  c-term may be amidated

SEQ ID NO: 475 - protein, 31 aa, Artificial Sequence; identical to SEQ ID NO: 205
  Description of Artificial Sequence: Synthetic peptide
  MOD_RES (8)..(9): Any L- or D-natural amino acid and any non-natural amino acid; see specification as filed for detailed description of substitutions, R-groups and preferred embodiments
  MOD_RES (11)..(12): Any L- or D-natural amino acid and any non-natural amino acid; see specification as filed for detailed description of substitutions, R-groups and preferred embodiments
  MOD_RES (15)..(18): Any L- or D-natural or non-natural amino acid, and this range may encompass 1 or 4 residues; see specification as filed for detailed description of substitutions, R-groups and preferred embodiments
  c-term may be amidated

SEQ ID NO: 476 - protein, 31 aa, Artificial Sequence; identical to SEQ ID NO: 206
  Description of Artificial Sequence: Synthetic peptide
  MOD_RES (13)..(13): Any L- or D-natural amino acid and any non-natural amino acid; see specification as filed for detailed description of substitutions, R-groups and preferred embodiments
  MOD_RES (15)..(18): Any L- or D-natural or non-natural amino acid, and this range may encompass 1 or 4 residues; see specification as filed for detailed description of substitutions, R-groups and preferred embodiments
  c-term may be amidated

SEQ ID NO: 477 - protein, 31 aa, Artificial Sequence; identical to SEQ ID NO: 207
  Description of Artificial Sequence: Synthetic peptide
  MOD_RES (1)..(1): Any L- or D-natural amino acid and any non-natural amino acid; see specification as filed for detailed description of substitutions, R-groups and preferred embodiments
  MOD_RES (9)..(9): Any L- or D-natural amino acid and any non-natural amino acid; see specification as filed for detailed description of substitutions, R-groups and preferred embodiments
  MOD_RES (11)..(11): Any L- or D-natural amino acid and any non-natural amino acid; see specification as filed for detailed description of substitutions, R-groups and preferred embodiments
  MOD_RES (13)..(13): Any L- or D-natural amino acid and any non-natural amino acid; see specification as filed for detailed description of substitutions, R-groups and preferred embodiments
  MOD_RES (15)..(18): Any L- or D-natural or non-natural amino acid, and this range may encompass 1 or 4 residues; see specification as filed for detailed description of substitutions, R-groups and preferred embodiments
  c-term may be amidated

SEQ ID NO: 478 - protein, 31 aa, Artificial Sequence; identical to SEQ ID NO: 208
  Description of Artificial Sequence: Synthetic peptide
  MOD_RES (2)..(2): Any L- or D-natural amino acid and any non-natural amino acid; see specification as filed for detailed description of substitutions, R-groups and preferred embodiments
  MOD_RES (9)..(9): Any L- or D-natural amino acid and any non-natural amino acid; see specification as filed for detailed description of substitutions, R-groups and preferred embodiments
  MOD_RES (11)..(11): Any L- or D-natural amino acid and any non-natural amino acid; see specification as filed for detailed description of substitutions, R-groups and preferred embodiments
  MOD_RES (13)..(13): Any L- or D-natural amino acid and any non-natural amino acid; see specification as filed for detailed description of substitutions, R-groups and preferred embodiments
  MOD_RES (15)..(18): Any L- or D-natural or non-natural amino acid, and this range may encompass 1 or 4 residues; see specification as filed for detailed description of substitutions, R-groups and preferred embodiments
  c-term may be amidated

SEQ ID NO: 479 - protein, 31 aa, Artificial Sequence; identical to SEQ ID NO: 209
  Description of Artificial Sequence: Synthetic peptide
  MOD_RES (3)..(3): Any L- or D-natural amino acid and any non-natural amino acid; see specification as filed for detailed description of substitutions, R-groups and preferred embodiments
  MOD_RES (9)..(9): Any L- or D-natural amino acid and any non-natural amino acid; see specification as filed for detailed description of substitutions, R-groups and preferred embodiments
  MOD_RES (11)..(11): Any L- or D-natural amino acid and any non-natural amino acid; see specification as filed for detailed description of substitutions, R-groups and preferred embodiments
  MOD_RES (13)..(13): Any L- or D-natural amino acid and any non-natural amino acid; see specification as filed for detailed description of substitutions, R-groups and preferred embodiments
  MOD_RES (15)..(18): Any L- or D-natural or non-natural amino acid, and this range may encompass 1 or 4 residues; see specification as filed for detailed description of substitutions, R-groups and preferred embodiments
  c-term may be amidated

SEQ ID NO: 480 - protein, 31 aa, Artificial Sequence; identical to SEQ ID NO: 210
  Description of Artificial Sequence: Synthetic peptide
  MOD_RES (4)..(4): Any L- or D-natural amino acid and any non-natural amino acid; see specification as filed for detailed description of substitutions, R-groups and preferred embodiments
  MOD_RES (9)..(9): Any L- or D-natural amino acid and any non-natural amino acid; see specification as filed for detailed description of substitutions, R-groups and preferred embodiments
  MOD_RES (11)..(11): Any L- or D-natural amino acid and any non-natural amino acid; see specification as filed for detailed description of substitutions, R-groups and preferred embodiments
  MOD_RES (13)..(13): Any L- or D-natural amino acid and any non-natural amino acid; see specification as filed for detailed description of substitutions, R-groups and preferred embodiments
  MOD_RES (15)..(18): Any L- or D-natural or non-natural amino acid, and this range may encompass 1 or 4 residues; see specification as filed for detailed description of substitutions, R-groups and preferred embodiments
  c-term may be amidated

SEQ ID NO: 481 - protein, 31 aa, Artificial Sequence; identical to SEQ ID NO: 211
  Description of Artificial Sequence: Synthetic peptide
  MOD_RES (5)..(5): Any L- or D-natural amino acid and any non-natural amino acid; see specification as filed for detailed description of substitutions, R-groups and preferred embodiments
  MOD_RES (9)..(9): Any L- or D-natural amino acid and any non-natural amino acid; see specification as filed for detailed description of substitutions, R-groups and preferred embodiments
  MOD_RES (11)..(11): Any L- or D-natural amino acid and any non-natural amino acid; see specification as filed for detailed description of substitutions, R-groups and preferred embodiments
  MOD_RES (13)..(13): Any L- or D-natural amino acid and any non-natural amino acid; see specification as filed for detailed description of substitutions, R-groups and preferred embodiments
  MOD_RES (15)..(18): Any L- or D-natural or non-natural amino acid, and this range may encompass 1 or 4 residues; see specification as filed for detailed description of substitutions, R-groups and preferred embodiments
  c-term may be amidated

SEQ ID NO: 482 - protein, 31 aa, Artificial Sequence; identical to SEQ ID NO: 212
  Description of Artificial Sequence: Synthetic peptide
  MOD_RES (6)..(6): Any L- or D-natural amino acid and any non-natural amino acid; see specification as filed for detailed description of substitutions, R-groups and preferred embodiments
  MOD_RES (9)..(9): Any L- or D-natural amino acid and any non-natural amino acid; see specification as filed for detailed description of substitutions, R-groups and preferred embodiments
  MOD_RES (11)..(11): Any L- or D-natural amino acid and any non-natural amino acid; see specification as filed for detailed description of substitutions, R-groups and preferred embodiments
  MOD_RES (13)..(13): Any L- or D-natural amino acid and any non-natural amino acid; see specification as filed for detailed description of substitutions, R-groups and preferred embodiments
  MOD_RES (15)..(18): Any L- or D-natural or non-natural amino acid, and this range may encompass 1 or 4 residues; see specification as filed for detailed description of substitutions, R-groups and preferred embodiments
  c-term may be amidated

SEQ ID NO: 483 - protein, 31 aa, Artificial Sequence; identical to SEQ ID NO: 213
  Description of Artificial Sequence: Synthetic peptide
  MOD_RES (7)..(7): Any L- or D-natural amino acid and any non-natural amino acid; see specification as filed for detailed description of substitutions, R-groups and preferred embodiments
  MOD_RES (9)..(9): Any L- or D-natural amino acid and any non-natural amino acid; see specification as filed for detailed description of substitutions, R-groups and preferred embodiments
  MOD_RES (11)..(11): Any L- or D-natural amino acid and any non-natural amino acid; see specification as filed for detailed description of substitutions, R-groups and preferred embodiments
  MOD_RES (13)..(13): Any L- or D-natural amino acid and any non-natural amino acid; see specification as filed for detailed description of substitutions, R-groups and preferred embodiments
  MOD_RES (15)..(18): Any L- or D-natural or non-natural amino acid, and this range may encompass 1 or 4 residues; see specification as filed for detailed description of substitutions, R-groups and preferred embodiments
  c-term may be amidated

SEQ ID NO: 484 - protein, 31 aa, Artificial Sequence; identical to SEQ ID NO: 214
  Description of Artificial Sequence: Synthetic peptide
  MOD_RES (8)..(9): Any L- or D-natural amino acid and any non-natural amino acid; see specification as filed for detailed description of substitutions, R-groups and preferred embodiments
  MOD_RES (11)..(11): Any L- or D-natural amino acid and any non-natural amino acid; see specification as filed for detailed description of substitutions, R-groups and preferred embodiments
  MOD_RES (13)..(13): Any L- or D-natural amino acid and any non-natural amino acid; see specification as filed for detailed description of substitutions, R-groups and preferred embodiments
  MOD_RES (15)..(18): Any L- or D-natural or non-natural amino acid, and this range may encompass 1 or 4 residues; see specification as filed for detailed description of substitutions, R-groups and preferred embodiments
  c-term may be amidated

SEQ ID NO: 485 - protein, 31 aa, Artificial Sequence; identical to SEQ ID NO: 215
  Description of Artificial Sequence: Synthetic peptide
  MOD_RES (14)..(14): Any L- or D-natural amino acid and any non-natural amino acid; see specification as filed for detailed description of substitutions, R-groups and preferred embodiments
  MOD_RES (15)..(18): Any L- or D-natural or non-natural amino acid, and this range may encompass 1 or 4 residues; see specification as filed for detailed description of substitutions, R-groups and preferred embodiments
  c-term may be amidated

SEQ ID NO: 486 - protein, 31 aa, Artificial Sequence; identical to SEQ ID NO: 216
  Description of Artificial Sequence: Synthetic peptide
  MOD_RES (1)..(1): Any L- or D-natural amino acid and any non-natural amino acid; see specification as filed for detailed description of substitutions, R-groups and preferred embodiments
  MOD_RES (9)..(9): Any L- or D-natural amino acid and any non-natural amino acid; see specification as filed for detailed description of substitutions, R-groups and preferred embodiments
  MOD_RES (11)..(11): Any L- or D-natural amino acid and any non-natural amino acid; see specification as filed for detailed description of substitutions, R-groups and preferred embodiments
  MOD_RES (14)..(14): Any L- or D-natural amino acid and any non-natural amino acid; see specification as filed for detailed description of substitutions, R-groups and preferred embodiments
  MOD_RES (15)..(18): Any L- or D-natural or non-natural amino acid, and this range may encompass 1 or 4 residues; see specification as filed for detailed description of substitutions, R-groups and preferred embodiments
  c-term may be amidated

SEQ ID NO: 487 - protein, 31 aa, Artificial Sequence; identical to SEQ ID NO: 217
  Description of Artificial Sequence: Synthetic peptide
  MOD_RES (2)..(2): Any L- or D-natural amino acid and any non-natural amino acid; see specification as filed for detailed description of substitutions, R-groups and preferred embodiments
  MOD_RES (9)..(9): Any L- or D-natural amino acid and any non-natural amino acid; see specification as filed for detailed description of substitutions, R-groups and preferred embodiments
  MOD_RES (11)..(11): Any L- or D-natural amino acid and any non-natural amino acid; see specification as filed for detailed description of substitutions, R-groups and preferred embodiments
  MOD_RES (14)..(14): Any L- or D-natural amino acid and any non-natural amino acid; see specification as filed for detailed description of substitutions, R-groups and preferred embodiments
  MOD_RES (15)..(18): Any L- or D-natural or non-natural amino acid, and this range may encompass 1 or 4 residues; see specification as filed for detailed description of substitutions, R-groups and preferred embodiments
  c-term may be amidated

SEQ ID NO: 488 - protein, 31 aa, Artificial Sequence; identical to SEQ ID NO: 218
  Description of Artificial Sequence: Synthetic peptide
  MOD_RES (3)..(3): Any L- or D-natural amino acid and any non-natural amino acid; see specification as filed for detailed description of substitutions, R-groups and preferred embodiments
  MOD_RES (9)..(9): Any L- or D-natural amino acid and any non-natural amino acid; see specification as filed for detailed description of substitutions, R-groups and preferred embodiments
  MOD_RES (11)..(11): Any L- or D-natural amino acid and any non-natural amino acid; see specification as filed for detailed description of substitutions, R-groups and preferred embodiments
  MOD_RES (14)..(14): Any L- or D-natural amino acid and any non-natural amino acid; see specification as filed for detailed description of substitutions, R-groups and preferred embodiments
  MOD_RES (15)..(18): Any L- or D-natural or non-natural amino acid, and this range may encompass 1 or 4 residues; see specification as filed for detailed description of substitutions, R-groups and preferred embodiments
  c-term may be amidated

SEQ ID NO: 489 - protein, 31 aa, Artificial Sequence; identical to SEQ ID NO: 219
  Description of Artificial Sequence: Synthetic peptide
  MOD_RES (4)..(4): Any L- or D-natural amino acid and any non-natural amino acid; see specification as filed for detailed description of substitutions, R-groups and preferred embodiments
  MOD_RES (9)..(9): Any L- or D-natural amino acid and any non-natural amino acid; see specification as filed for detailed description of substitutions, R-groups and preferred embodiments
  MOD_RES (11)..(11): Any L- or D-natural amino acid and any non-natural amino acid; see specification as filed for detailed description of substitutions, R-groups and preferred embodiments
  MOD_RES (14)..(14): Any L- or D-natural amino acid and any non-natural amino acid; see specification as filed for detailed description of substitutions, R-groups and preferred embodiments
  MOD_RES (15)..(18): Any L- or D-natural or non-natural amino acid, and this range may encompass 1 or 4 residues; see specification as filed for detailed description of substitutions, R-groups and preferred embodiments
  c-term may be amidated

SEQ ID NO: 490 - protein, 31 aa, Artificial Sequence; identical to SEQ ID NO: 220
  Description of Artificial Sequence: Synthetic peptide
  MOD_RES (5)..(5): Any L- or D-natural amino acid and any non-natural amino acid; see specification as filed for detailed description of substitutions, R-groups and preferred embodiments
  MOD_RES (9)..(9): Any L- or D-natural amino acid and any non-natural amino acid; see specification as filed for detailed description of substitutions, R-groups and preferred embodiments
  MOD_RES (11)..(11): Any L- or D-natural amino acid and any non-natural amino acid; see specification as filed for detailed description of substitutions, R-groups and preferred embodiments
  MOD_RES (14)..(14): Any L- or D-natural amino acid and any non-natural amino acid; see specification as filed for detailed description of substitutions, R-groups and preferred embodiments
  MOD_RES (15)..(18): Any L- or D-natural or non-natural amino acid, and this range may encompass 1 or 4 residues; see specification as filed for detailed description of substitutions, R-groups and preferred embodiments
  c-term may be amidated

SEQ ID NO: 491 - protein, 31 aa, Artificial Sequence; identical to SEQ ID NO: 221
  Description of Artificial Sequence: Synthetic peptide
  MOD_RES (6)..(6): Any L- or D-natural amino acid and any non-natural amino acid; see specification as filed for detailed description of substitutions, R-groups and preferred embodiments
  MOD_RES (9)..(9): Any L- or D-natural amino acid and any non-natural amino acid; see specification as filed for detailed description of substitutions, R-groups and preferred embodiments
  MOD_RES (11)..(11): Any L- or D-natural amino acid and any non-natural amino acid; see specification as filed for detailed description of substitutions, R-groups and preferred embodiments
  MOD_RES (14)..(14): Any L- or D-natural amino acid and any non-natural amino acid; see specification as filed for detailed description of substitutions, R-groups and preferred embodiments
  MOD_RES (15)..(18): Any L- or D-natural or non-natural amino acid, and this range may encompass 1 or 4 residues; see specification as filed for detailed description of substitutions, R-groups and preferred embodiments
  c-term may be amidated

SEQ ID NO: 492 - protein, 31 aa, Artificial Sequence; identical to SEQ ID NO: 222
  Description of Artificial Sequence: Synthetic peptide
  MOD_RES (7)..(7): Any L- or D-natural amino acid and any non-natural amino acid; see specification as filed for detailed description of substitutions, R-groups and preferred embodiments
  MOD_RES (9)..(9): Any L- or D-natural amino acid and any non-natural amino acid; see specification as filed for detailed description of substitutions, R-groups and preferred embodiments
  MOD_RES (11)..(11): Any L- or D-natural amino acid and any non-natural amino acid; see specification as filed for detailed description of substitutions, R-groups and preferred embodiments
  MOD_RES (14)..(14): Any L- or D-natural amino acid and any non-natural amino acid; see specification as filed for detailed description of substitutions, R-groups and preferred embodiments
  MOD_RES (15)..(18): Any L- or D-natural or non-natural amino acid, and this range may encompass 1 or 4 residues; see specification as filed for detailed description of substitutions, R-groups and preferred embodiments
  c-term may be amidated

SEQ ID NO: 493 - protein, 31 aa, Artificial Sequence; identical to SEQ ID NO: 223
  Description of Artificial Sequence: Synthetic peptide
  MOD_RES (8)..(9): Any L- or D-natural amino acid and any non-natural amino acid; see specification as filed for detailed description of substitutions, R-groups and preferred embodiments
  MOD_RES (11)..(11): Any L- or D-natural amino acid and any non-natural amino acid; see specification as filed for detailed description of substitutions, R-groups and preferred embodiments
  MOD_RES (14)..(14): Any L- or D-natural amino acid and any non-natural amino acid; see specification as filed for detailed description of substitutions, R-groups and preferred embodiments
  MOD_RES (15)..(18): Any L- or D-natural or non-natural amino acid, and this range may encompass 1 or 4 residues; see specification as filed for detailed description of substitutions, R-groups and preferred embodiments
  c-term may be amidated

SEQ ID NO: 494 - protein, 34 aa, Artificial Sequence; identical to SEQ ID NO: 296
  Description of Artificial Sequence: Synthetic peptide
  MOD_RES (18)..(21): Any L- or D-natural or non-natural amino acid, and this range may encompass 1 or 4 residues; see specification as filed for detailed description of substitutions, R-groups and preferred embodiments
  c-term may be amidated

SEQ ID NO: 495 - protein, 34 aa, Artificial Sequence; identical to SEQ ID NO: 297
  Description of Artificial Sequence: Synthetic peptide
  MOD_RES (1)..(1): Any L- or D-natural amino acid and any non-natural amino acid; see specification as filed for detailed description of substitutions, R-groups and preferred embodiments
  MOD_RES (9)..(9): Any L- or D-natural amino acid and any non-natural amino acid; see specification as filed for detailed description of substitutions, R-groups and preferred embodiments
  MOD_RES (11)..(11): Any L- or D-natural amino acid and any non-natural amino acid; see specification as filed for detailed description of substitutions, R-groups and preferred embodiments
  MOD_RES (18)..(21): Any L- or D-natural or non-natural amino acid, and this range may encompass 1 or 4 residues; see specification as filed for detailed description of substitutions, R-groups and preferred embodiments
  c-term may be amidated

SEQ ID NO: 496 - protein, 34 aa, Artificial Sequence; identical to SEQ ID NO: 298
  Description of Artificial Sequence: Synthetic peptide
  MOD_RES (2)..(2): Any L- or D-natural amino acid and any non-natural amino acid; see specification as filed for detailed description of substitutions, R-groups and preferred embodiments
  MOD_RES (9)..(9): Any L- or D-natural amino acid and any non-natural amino acid; see specification as filed for detailed description of substitutions, R-groups and preferred embodiments
  MOD_RES (11)..(11): Any L- or D-natural amino acid and any non-natural amino acid; see specification as filed for detailed description of substitutions, R-groups and preferred embodiments
  MOD_RES (18)..(21): Any L- or D-natural or non-natural amino acid, and this range may encompass 1 or 4 residues; see specification as filed for detailed description of substitutions, R-groups and preferred embodiments
  c-term may be amidated

SEQ ID NO: 497 - protein, 34 aa, Artificial Sequence; identical to SEQ ID NO: 299
  Description of Artificial Sequence: Synthetic peptide
  MOD_RES (3)..(3): Any L- or D-natural amino acid and any non-natural amino acid; see specification as filed for detailed description of substitutions, R-groups and preferred embodiments
  MOD_RES (9)..(9): Any L- or D-natural amino acid and any non-natural amino acid; see specification as filed for detailed description of substitutions, R-groups and preferred embodiments
  MOD_RES (11)..(11): Any L- or D-natural amino acid and any non-natural amino acid; see specification as filed for detailed description of substitutions, R-groups and preferred embodiments
  MOD_RES (18)..(21): Any L- or D-natural or non-natural amino acid, and this range may encompass 1 or 4 residues; see specification as filed for detailed description of substitutions, R-groups and preferred embodiments
  c-term may be amidated

SEQ ID NO: 498 - protein, 34 aa, Artificial Sequence; identical to SEQ ID NO: 300
  Description of Artificial Sequence: Synthetic peptide
  MOD_RES (4)..(4): Any L- or D-natural amino acid and any non-natural amino acid; see specification as filed for detailed description of substitutions, R-groups and preferred embodiments
  MOD_RES (9)..(9): Any L- or D-natural amino acid and any non-natural amino acid; see specification as filed for detailed description of substitutions, R-groups and preferred embodiments
  MOD_RES (11)..(11): Any L- or D-natural amino acid and any non-natural amino acid; see specification as filed for detailed description of substitutions, R-groups and preferred embodiments
  MOD_RES (18)..(21): Any L- or D-natural or non-natural amino acid, and this range may encompass 1 or 4 residues; see specification as filed for detailed description of substitutions, R-groups and preferred embodiments
  c-term may be amidated

SEQ ID NO: 499 - protein, 34 aa, Artificial Sequence; identical to SEQ ID NO: 301
  Description of Artificial Sequence: Synthetic peptide
  MOD_RES (5)..(5): Any L- or D-natural amino acid and any non-natural amino acid; see specification as filed for detailed description of substitutions, R-groups and preferred embodiments
  MOD_RES (9)..(9): Any L- or D-natural amino acid and any non-natural amino acid; see specification as filed for detailed description of substitutions, R-groups and preferred embodiments
  MOD_RES (11)..(11): Any L- or D-natural amino acid and any non-natural amino acid; see specification as filed for detailed description of substitutions, R-groups and preferred embodiments
  MOD_RES (18)..(21): Any L- or D-natural or non-natural amino acid, and this range may encompass 1 or 4 residues; see specification as filed for detailed description of substitutions, R-groups and preferred embodiments
  c-term may be amidated

SEQ ID NO: 500 - protein, 34 aa, Artificial Sequence; identical to SEQ ID NO: 302
  Description of Artificial Sequence: Synthetic peptide
  MOD_RES (6)..(6): Any L- or D-natural amino acid and any non-natural amino acid; see specification as filed for detailed description of substitutions, R-groups and preferred embodiments
  MOD_RES (9)..(9): Any L- or D-natural amino acid and any non-natural amino acid; see specification as filed for detailed description of substitutions, R-groups and preferred embodiments
  MOD_RES (11)..(11): Any L- or D-natural amino acid and any non-natural amino acid; see specification as filed for detailed description of substitutions, R-groups and preferred embodiments
  MOD_RES (18)..(21): Any L- or D-natural or non-natural amino acid, and this range may encompass 1 or 4 residues; see specification as filed for detailed description of substitutions, R-groups and preferred embodiments
  c-term may be amidated

SEQ ID NO: 501 - protein, 34 aa, Artificial Sequence; identical to SEQ ID NO: 303
  Description of Artificial Sequence: Synthetic peptide
  MOD_RES (7)..(7): Any L- or D-natural amino acid and any non-natural amino acid; see specification as filed for detailed description of substitutions, R-groups and preferred embodiments
  MOD_RES (9)..(9): Any L- or D-natural amino acid and any non-natural amino acid; see specification as filed for detailed description of substitutions, R-groups and preferred embodiments
  MOD_RES (11)..(11): Any L- or D-natural amino acid and any non-natural amino acid; see specification as filed for detailed description of substitutions, R-groups and preferred embodiments
  MOD_RES (18)..(21): Any L- or D-natural or non-natural amino acid, and this range may encompass 1 or 4 residues; see specification as filed for detailed description of substitutions, R-groups and preferred embodiments
  c-term may be amidated

SEQ ID NO: 502 - protein, 34 aa, Artificial Sequence; identical to SEQ ID NO: 304
  Description of Artificial Sequence: Synthetic peptide
  MOD_RES (8)..(9): Any L- or D-natural amino acid and any non-natural amino acid; see specification as filed for detailed description of substitutions, R-groups and preferred embodiments
  MOD_RES (11)..(11): Any L- or D-natural amino acid and any non-natural amino acid; see specification as filed for detailed description of substitutions, R-groups and preferred embodiments
  MOD_RES (18)..(21): Any L- or D-natural or non-natural amino acid, and this range may encompass 1 or 4 residues; see specification as filed for detailed description of substitutions, R-groups and preferred embodiments
  c-term may be amidated

SEQ ID NO: 503 - protein, 34 aa, Artificial Sequence; identical to SEQ ID NO: 305
  Description of Artificial Sequence: Synthetic peptide
  MOD_RES (12)..(12): Any L- or D-natural amino acid and any non-natural amino acid; see specification as filed for detailed description of substitutions, R-groups and preferred embodiments
  MOD_RES (18)..(21): Any L- or D-natural or non-natural amino acid, and this range may encompass 1 or 4 residues; see specification as filed for detailed description of substitutions, R-groups and preferred embodiments
  c-term may be amidated

SEQ ID NO: 504 - protein, 34 aa, Artificial Sequence; identical to SEQ ID NO: 306
  Description of Artificial Sequence: Synthetic peptide
  MOD_RES (1)..(1): Any L- or D-natural amino acid and any non-natural amino acid; see specification as filed for detailed description of substitutions, R-groups and preferred embodiments
  MOD_RES (9)..(9): Any L- or D-natural amino acid and any non-natural amino acid; see specification as filed for detailed description of substitutions, R-groups and preferred embodiments
  MOD_RES (11)..(12): Any L- or D-natural amino acid and any non-natural amino acid; see specification as filed for detailed description of substitutions, R-groups and preferred embodiments
  MOD_RES (18)..(21): Any L- or D-natural or non-natural amino acid, and this range may encompass 1 or 4 residues; see specification as filed for detailed description of substitutions, R-groups and preferred embodiments
  c-term may be amidated

SEQ ID NO: 505 - protein, 34 aa, Artificial Sequence; identical to SEQ ID NO: 307
  Description of Artificial Sequence: Synthetic peptide
  MOD_RES (2)..(2): Any L- or D-natural amino acid and any non-natural amino acid; see specification as filed for detailed description of substitutions, R-groups and preferred embodiments
  MOD_RES (9)..(9): Any L- or D-natural amino acid and any non-natural amino acid; see specification as filed for detailed description of substitutions, R-groups and preferred embodiments
  MOD_RES (11)..(12): Any L- or D-natural amino acid and any non-natural amino acid; see specification as filed for detailed description of substitutions, R-groups and preferred embodiments
  MOD_RES (18)..(21): Any L- or D-natural or non-natural amino acid, and this range may encompass 1 or 4 residues; see specification as filed for detailed description of substitutions, R-groups and preferred embodiments
  c-term may be amidated

SEQ ID NO: 506 - protein, 34 aa, Artificial Sequence; identical to SEQ ID NO: 308
  Description of Artificial Sequence: Synthetic peptide
  MOD_RES (3)..(3): Any L- or D-natural amino acid and any non-natural amino acid; see specification as filed for detailed description of substitutions, R-groups and preferred embodiments
  MOD_RES (9)..(9): Any L- or D-natural amino acid and any non-natural amino acid; see specification as filed for detailed description of substitutions, R-groups and preferred embodiments
  MOD_RES (11)..(12): Any L- or D-natural amino acid and any non-natural amino acid; see specification as filed for detailed description of substitutions, R-groups and preferred embodiments
  MOD_RES (18)..(21): Any L- or D-natural or non-natural amino acid, and this range may encompass 1 or 4 residues; see specification as filed for detailed description of substitutions, R-groups and preferred embodiments
  c-term may be amidated

SEQ ID NO: 507 - protein, 34 aa, Artificial Sequence; identical to SEQ ID NO: 309
  Description of Artificial Sequence: Synthetic peptide
  MOD_RES (4)..(4): Any L- or D-natural amino acid and any non-natural amino acid; see specification as filed for detailed description of substitutions, R-groups and preferred embodiments
  MOD_RES (9)..(9): Any L- or D-natural amino acid and any non-natural amino acid; see specification as filed for detailed description of substitutions, R-groups and preferred embodiments
  MOD_RES (11)..(12): Any L- or D-natural amino acid and any non-natural amino acid; see specification as filed for detailed description of substitutions, R-groups and preferred embodiments
  MOD_RES (18)..(21): Any L- or D-natural or non-natural amino acid, and this range may encompass 1 or 4 residues; see specification as filed for detailed description of substitutions, R-groups and preferred embodiments
  c-term may be amidated

SEQ ID NO: 508 - protein, 34 aa, Artificial Sequence; identical to SEQ ID NO: 310
  Description of Artificial Sequence: Synthetic peptide
  MOD_RES (5)..(5): Any L- or D-natural amino acid and any non-natural amino acid; see specification as filed for detailed description of substitutions, R-groups and preferred embodiments
  MOD_RES (9)..(9): Any L- or D-natural amino acid and any non-natural amino acid; see specification as filed for detailed description of substitutions, R-groups and preferred embodiments
  MOD_RES (11)..(12): Any L- or D-natural amino acid and any non-natural amino acid; see specification as filed for detailed description of substitutions, R-groups and preferred embodiments
  MOD_RES (18)..(21): Any L- or D-natural or non-natural amino acid, and this range may encompass 1 or 4 residues; see specification as filed for detailed description of substitutions, R-groups and preferred embodiments
  c-term may be amidated

SEQ ID NO: 509 - protein, 34 aa, Artificial Sequence; identical to SEQ ID NO: 311
  Description of Artificial Sequence: Synthetic peptide
  MOD_RES (6)..(6): Any L- or D-natural amino acid and any non-natural amino acid; see specification as filed for detailed description of substitutions, R-groups and preferred embodiments
  MOD_RES (9)..(9): Any L- or D-natural amino acid and any non-natural amino acid; see specification as filed for detailed description of substitutions, R-groups and preferred embodiments
  MOD_RES (11)..(12): Any L- or D-natural amino acid and any non-natural amino acid; see specification as filed for detailed description of substitutions, R-groups and preferred embodiments
  MOD_RES (18)..(21): Any L- or D-natural or non-natural amino acid, and this range may encompass 1 or 4 residues; see specification as filed for detailed description of substitutions, R-groups and preferred embodiments
  c-term may be amidated

SEQ ID NO: 510 - protein, 34 aa, Artificial Sequence; identical to SEQ ID NO: 312
  Description of Artificial Sequence: Synthetic peptide
  MOD_RES (7)..(7): Any L- or D-natural amino acid and any non-natural amino acid; see specification as filed for detailed description of substitutions, R-groups and preferred embodiments
  MOD_RES (9)..(9): Any L- or D-natural amino acid and any non-natural amino acid; see specification as filed for detailed description of substitutions, R-groups and preferred embodiments
  MOD_RES (11)..(12): Any L- or D-natural amino acid and any non-natural amino acid; see specification as filed for detailed description of substitutions, R-groups and preferred embodiments
  MOD_RES (18)..(21): Any L- or D-natural or non-natural amino acid, and this range may encompass 1 or 4 residues; see specification as filed for detailed description of substitutions, R-groups and preferred embodiments
  c-term may be amidated

SEQ ID NO: 511 - protein, 34 aa, Artificial Sequence; identical to SEQ ID NO: 313
  Description of Artificial Sequence: Synthetic peptide
  MOD_RES (8)..(9): Any L- or D-natural amino acid and any non-natural amino acid; see specification as filed for detailed description of substitutions, R-groups and preferred embodiments
  MOD_RES (11)..(12): Any L- or D-natural amino acid and any non-natural amino acid; see specification as filed for detailed description of substitutions, R-groups and preferred embodiments
  MOD_RES (18)..(21): Any L- or D-natural or non-natural amino acid, and this range may encompass 1 or 4 residues; see specification as filed for detailed description of substitutions, R-groups and preferred embodiments
  c-term may be amidated

SEQ ID NO: 512 - protein, 34 aa, Artificial Sequence; identical to SEQ ID NO: 314
  Description of Artificial Sequence: Synthetic peptide
  MOD_RES (13)..(13): Any L- or D-natural amino acid and any non-natural amino acid; see specification as filed for detailed description of substitutions, R-groups and preferred embodiments
  MOD_RES (18)..(21): Any L- or D-natural or non-natural amino acid, and this range may encompass 1 or 4 residues; see specification as filed for detailed description of substitutions, R-groups and preferred embodiments
  c-term may be amidated

SEQ ID NO: 513 - protein, 34 aa, Artificial Sequence; identical to SEQ ID NO: 315
  Description of Artificial Sequence: Synthetic peptide
  MOD_RES (1)..(1): Any L- or D-natural amino acid and any non-natural amino acid; see specification as filed for detailed description of substitutions, R-groups and preferred embodiments
  MOD_RES (9)..(9): Any L- or D-natural amino acid and any non-natural amino acid; see specification as filed for detailed description of substitutions, R-groups and preferred embodiments
  MOD_RES (11)..(11): Any L- or D-natural amino acid and any non-natural amino acid; see specification as filed for detailed description of substitutions, R-groups and preferred embodiments
  MOD_RES (13)..(13): Any L- or D-natural amino acid and any non-natural amino acid; see specification as filed for detailed description of substitutions, R-groups and preferred embodiments
  MOD_RES (18)..(21): Any L- or D-natural or non-natural amino acid, and this range may encompass 1 or 4 residues; see specification as filed for detailed description of substitutions, R-groups and preferred embodiments
  c-term may be amidated

SEQ ID NO: 514 - protein, 34 aa, Artificial Sequence; identical to SEQ ID NO: 316
  Description of Artificial Sequence: Synthetic peptide
  MOD_RES (2)..(2): Any L- or D-natural amino acid and any non-natural amino acid; see specification as filed for detailed description of substitutions, R-groups and preferred embodiments
  MOD_RES (9)..(9): Any L- or D-natural amino acid and any non-natural amino acid; see specification as filed for detailed description of substitutions, R-groups and preferred embodiments
  MOD_RES (11)..(11): Any L- or D-natural amino acid and any non-natural amino acid; see specification as filed for detailed description of substitutions, R-groups and preferred embodiments
  MOD_RES (13)..(13): Any L- or D-natural amino acid and any non-natural amino acid; see specification as filed for detailed description of substitutions, R-groups and preferred embodiments
  MOD_RES (18)..(21): Any L- or D-natural or non-natural amino acid, and this range may encompass 1 or 4 residues; see specification as filed for detailed description of substitutions, R-groups and preferred embodiments
  c-term may be amidated

SEQ ID NO: 515 - protein, 34 aa, Artificial Sequence; identical to SEQ ID NO: 317
  Description of Artificial Sequence: Synthetic peptide
  MOD_RES (3)..(3): Any L- or D-natural amino acid and any non-natural amino acid; see specification as filed for detailed description of substitutions, R-groups and preferred embodiments
  MOD_RES (9)..(9): Any L- or D-natural amino acid and any non-natural amino acid; see specification as filed for detailed description of substitutions, R-groups and preferred embodiments
  MOD_RES (11)..(11): Any L- or D-natural amino acid and any non-natural amino acid; see specification as filed for detailed description of substitutions, R-groups and preferred embodiments
  MOD_RES (13)..(13): Any L- or D-natural amino acid and any non-natural amino acid; see specification as filed for detailed description of substitutions, R-groups and preferred embodiments
  MOD_RES (18)..(21): Any L- or D-natural or non-natural amino acid, and this range may encompass 1 or 4 residues; see specification as filed for detailed description of substitutions, R-groups and preferred embodiments
  c-term may be amidated

SEQ ID NO: 516 - protein, 34 aa, Artificial Sequence; identical to SEQ ID NO: 318
  Description of Artificial Sequence: Synthetic peptide
  MOD_RES (4)..(4): Any L- or D-natural amino acid and any non-natural amino acid; see specification as filed for detailed description of substitutions, R-groups and preferred embodiments
  MOD_RES (9)..(9): Any L- or D-natural amino acid and any non-natural amino acid; see specification as filed for detailed description of substitutions, R-groups and preferred embodiments
  MOD_RES (11)..(11): Any L- or D-natural amino acid and any non-natural amino acid; see specification as filed for detailed description of substitutions, R-groups and preferred embodiments
  MOD_RES (13)..(13): Any L- or D-natural amino acid and any non-natural amino acid; see specification as filed for detailed description of substitutions, R-groups and preferred embodiments
  MOD_RES (18)..(21): Any L- or D-natural or non-natural amino acid, and this range may encompass 1 or 4 residues; see specification as filed for detailed description of substitutions, R-groups and preferred embodiments
  c-term may be amidated

SEQ ID NO: 517 - protein, 34 aa, Artificial Sequence; identical to SEQ ID NO: 319
  Description of Artificial Sequence: Synthetic peptide
  MOD_RES (5)..(5): Any L- or D-natural amino acid and any non-natural amino acid; see specification as filed for detailed description of substitutions, R-groups and preferred embodiments
  MOD_RES (9)..(9): Any L- or D-natural amino acid and any non-natural amino acid; see specification as filed for detailed description of substitutions, R-groups and preferred embodiments
  MOD_RES (11)..(11): Any L- or D-natural amino acid and any non-natural amino acid; see specification as filed for detailed description of substitutions, R-groups and preferred embodiments
  MOD_RES (13)..(13): Any L- or D-natural amino acid and any non-natural amino acid; see specification as filed for detailed description of substitutions, R-groups and preferred embodiments
  MOD_RES (18)..(21): Any L- or D-natural or non-natural amino acid, and this range may encompass 1 or 4 residues; see specification as filed for detailed description of substitutions, R-groups and preferred embodiments
  c-term may be amidated

SEQ ID NO: 518 - protein, 34 aa, Artificial Sequence; identical to SEQ ID NO: 320
  Description of Artificial Sequence: Synthetic peptide
  MOD_RES (6)..(6): Any L- or D-natural amino acid and any non-natural amino acid; see specification as filed for detailed description of substitutions, R-groups and preferred embodiments
  MOD_RES (9)..(9): Any L- or D-natural amino acid and any non-natural amino acid; see specification as filed for detailed description of substitutions, R-groups and preferred embodiments
  MOD_RES (11)..(11): Any L- or D-natural amino acid and any non-natural amino acid; see specification as filed for detailed description of substitutions, R-groups and preferred embodiments
  MOD_RES (13)..(13): Any L- or D-natural amino acid and any non-natural amino acid; see specification as filed for detailed description of substitutions, R-groups and preferred embodiments
  MOD_RES (18)..(21): Any L- or D-natural or non-natural amino acid, and this range may encompass 1 or 4 residues; see specification as filed for detailed description of substitutions, R-groups and preferred embodiments
  c-term may be amidated

SEQ ID NO: 519 - protein, 34 aa, Artificial Sequence; identical to SEQ ID NO: 321
  Description of Artificial Sequence: Synthetic peptide
  MOD_RES (7)..(7): Any L- or D-natural amino acid and any non-natural amino acid; see specification as filed for detailed description of substitutions, R-groups and preferred embodiments
  MOD_RES (9)..(9): Any L- or D-natural amino acid and any non-natural amino acid; see specification as filed for detailed description of substitutions, R-groups and preferred embodiments
  MOD_RES (11)..(11): Any L- or D-natural amino acid and any non-natural amino acid; see specification as filed for detailed description of substitutions, R-groups and preferred embodiments
  MOD_RES (13)..(13): Any L- or D-natural amino acid and any non-natural amino acid; see specification as filed for detailed description of substitutions, R-groups and preferred embodiments
  MOD_RES (18)..(21): Any L- or D-natural or non-natural amino acid, and this range may encompass 1 or 4 residues; see specification as filed for detailed description of substitutions, R-groups and preferred embodiments
  c-term may be amidated

SEQ ID NO: 520 - protein, 34 aa, Artificial Sequence; identical to SEQ ID NO: 322
  Description of Artificial Sequence: Synthetic peptide
  MOD_RES (8)..(9): Any L- or D-natural amino acid and any non-natural amino acid; see specification as filed for detailed description of substitutions, R-groups and preferred embodiments
  MOD_RES (11)..(11): Any L- or D-natural amino acid and any non-natural amino acid; see specification as filed for detailed description of substitutions, R-groups and preferred embodiments
  MOD_RES (13)..(13): Any L- or D-natural amino acid and any non-natural amino acid; see specification as filed for detailed description of substitutions, R-groups and preferred embodiments
  MOD_RES (18)..(21): Any L- or D-natural or non-natural amino acid, and this range may encompass 1 or 4 residues; see specification as filed for detailed description of substitutions, R-groups and preferred embodiments
  c-term may be amidated

SEQ ID NO: 521 - protein, 34 aa, Artificial Sequence; identical to SEQ ID NO: 323
  Description of Artificial Sequence: Synthetic peptide
  MOD_RES (14)..(14): Any L- or D-natural amino acid and any non-natural amino acid; see specification as filed for detailed description of substitutions, R-groups and preferred embodiments
  MOD_RES (18)..(21): Any L- or D-natural or non-natural amino acid, and this range may encompass 1 or 4 residues; see specification as filed for detailed description of substitutions, R-groups and preferred embodiments
  c-term may be amidated

SEQ ID NO: 522 - protein, 34 aa, Artificial Sequence; identical to SEQ ID NO: 324
  Description of Artificial Sequence: Synthetic peptide
  MOD_RES (1)..(1): Any L- or D-natural amino acid and any non-natural amino acid; see specification as filed for detailed description of substitutions, R-groups and preferred embodiments
  MOD_RES (9)..(9): Any L- or D-natural amino acid and any non-natural amino acid; see specification as filed for detailed description of substitutions, R-groups and preferred embodiments
  MOD_RES (11)..(11): Any L- or D-natural amino acid and any non-natural amino acid; see specification as filed for detailed description of substitutions, R-groups and preferred embodiments
  MOD_RES (14)..(14): Any L- or D-natural amino acid and any non-natural amino acid; see specification as filed for detailed description of substitutions, R-groups and preferred embodiments
  MOD_RES (18)..(21): Any L- or D-natural or non-natural amino acid, and this range may encompass 1 or 4 residues; see specification as filed for detailed description of substitutions, R-groups and preferred embodiments
  c-term may be amidated

SEQ ID NO: 523 - protein, 34 aa, Artificial Sequence; identical to SEQ ID NO: 325
  Description of Artificial Sequence: Synthetic peptide
  MOD_RES (2)..(2): Any L- or D-natural amino acid and any non-natural amino acid; see specification as filed for detailed description of substitutions, R-groups and preferred embodiments
  MOD_RES (9)..(9): Any L- or D-natural amino acid and any non-natural amino acid; see specification as filed for detailed description of substitutions, R-groups and preferred embodiments
  MOD_RES (11)..(11): Any L- or D-natural amino acid and any non-natural amino acid; see specification as filed for detailed description of substitutions, R-groups and preferred embodiments
  MOD_RES (14)..(14): Any L- or D-natural amino acid and any non-natural amino acid; see specification as filed for detailed description of substitutions, R-groups and preferred embodiments
  MOD_RES (18)..(21): Any L- or D-natural or non-natural amino acid, and this range may encompass 1 or 4 residues; see specification as filed for detailed description of substitutions, R-groups and preferred embodiments
  c-term may be amidated

SEQ ID NO: 524 - protein, 34 aa, Artificial Sequence; identical to SEQ ID NO: 326
  Description of Artificial Sequence: Synthetic peptide
  MOD_RES (3)..(3): Any L- or D-natural amino acid and any non-natural amino acid; see specification as filed for detailed description of substitutions, R-groups and preferred embodiments
  MOD_RES (9)..(9): Any L- or D-natural amino acid and any non-natural amino acid; see specification as filed for detailed description of substitutions, R-groups and preferred embodiments
  MOD_RES (11)..(11): Any L- or D-natural amino acid and any non-natural amino acid; see specification as filed for detailed description of substitutions, R-groups and preferred embodiments
  MOD_RES (14)..(14): Any L- or D-natural amino acid and any non-natural amino acid; see specification as filed for detailed description of substitutions, R-groups and preferred embodiments
  MOD_RES (18)..(21): Any L- or D-natural or non-natural amino acid, and this range may encompass 1 or 4 residues; see specification as filed for detailed description of substitutions, R-groups and preferred embodiments
  c-term may be amidated

SEQ ID NO: 525 - protein, 34 aa, Artificial Sequence; identical to SEQ ID NO: 327
  Description of Artificial Sequence: Synthetic peptide
  MOD_RES (4)..(4): Any L- or D-natural amino acid and any non-natural amino acid; see specification as filed for detailed description of substitutions, R-groups and preferred embodiments
  MOD_RES (9)..(9): Any L- or D-natural amino acid and any non-natural amino acid; see specification as filed for detailed description of substitutions, R-groups and preferred embodiments
  MOD_RES (11)..(11): Any L- or D-natural amino acid and any non-natural amino acid; see specification as filed for detailed description of substitutions, R-groups and preferred embodiments
  MOD_RES (14)..(14): Any L- or D-natural amino acid and any non-natural amino acid; see specification as filed for detailed description of substitutions, R-groups and preferred embodiments
  MOD_RES (18)..(21): Any L- or D-natural or non-natural amino acid, and this range may encompass 1 or 4 residues; see specification as filed for detailed description of substitutions, R-groups and preferred embodiments
  c-term may be amidated

SEQ ID NO: 526 - protein, 34 aa, Artificial Sequence; identical to SEQ ID NO: 328
  Description of Artificial Sequence: Synthetic peptide
  MOD_RES (5)..(5): Any L- or D-natural amino acid and any non-natural amino acid; see specification as filed for detailed description of substitutions, R-groups and preferred embodiments
  MOD_RES (9)..(9): Any L- or D-natural amino acid and any non-natural amino acid; see specification as filed for detailed description of substitutions, R-groups and preferred embodiments
  MOD_RES (11)..(11): Any L- or D-natural amino acid and any non-natural amino acid; see specification as filed for detailed description of substitutions, R-groups and preferred embodiments
  MOD_RES (14)..(14): Any L- or D-natural amino acid and any non-natural amino acid; see specification as filed for detailed description of substitutions, R-groups and preferred embodiments
  MOD_RES (18)..(21): Any L- or D-natural or non-natural amino acid, and this range may encompass 1 or 4 residues; see specification as filed for detailed description of substitutions, R-groups and preferred embodiments
  c-term may be amidated

SEQ ID NO: 527 - protein, 34 aa, Artificial Sequence; identical to SEQ ID NO: 329
  Description of Artificial Sequence: Synthetic peptide
  MOD_RES (6)..(6): Any L- or D-natural amino acid and any non-natural amino acid; see specification as filed for detailed description of substitutions, R-groups and preferred embodiments
  MOD_RES (9)..(9): Any L- or D-natural amino acid and any non-natural amino acid; see specification as filed for detailed description of substitutions, R-groups and preferred embodiments
  MOD_RES (11)..(11): Any L- or D-natural amino acid and any non-natural amino acid; see specification as filed for detailed description of substitutions, R-groups and preferred embodiments
  MOD_RES (14)..(14): Any L- or D-natural amino acid and any non-natural amino acid; see specification as filed for detailed description of substitutions, R-groups and preferred embodiments
  MOD_RES (18)..(21): Any L- or D-natural or non-natural amino acid, and this range may encompass 1 or 4 residues; see specification as filed for detailed description of substitutions, R-groups and preferred embodiments
  c-term may be amidated

SEQ ID NO: 528 - protein, 34 aa, Artificial Sequence; identical to SEQ ID NO: 330
  Description of Artificial Sequence: Synthetic peptide
  MOD_RES (7)..(7): Any L- or D-natural amino acid and any non-natural amino acid; see specification as filed for detailed description of substitutions, R-groups and preferred embodiments
  MOD_RES (9)..(9): Any L- or D-natural amino acid and any non-natural amino acid; see specification as filed for detailed description of substitutions, R-groups and preferred embodiments
  MOD_RES (11)..(11): Any L- or D-natural amino acid and any non-natural amino acid; see specification as filed for detailed description of substitutions, R-groups and preferred embodiments
  MOD_RES (14)..(14): Any L- or D-natural amino acid and any non-natural amino acid; see specification as filed for detailed description of substitutions, R-groups and preferred embodiments
  MOD_RES (18)..(21): Any L- or D-natural or non-natural amino acid, and this range may encompass 1 or 4 residues; see specification as filed for detailed description of substitutions, R-groups and preferred embodiments
  c-term may be amidated

SEQ ID NO: 529 - protein, 34 aa, Artificial Sequence; identical to SEQ ID NO: 331
  Description of Artificial Sequence: Synthetic peptide
  MOD_RES (8)..(9): Any L- or D-natural amino acid and any non-natural amino acid; see specification as filed for detailed description of substitutions, R-groups and preferred embodiments
  MOD_RES (11)..(11): Any L- or D-natural amino acid and any non-natural amino acid; see specification as filed for detailed description of substitutions, R-groups and preferred embodiments
  MOD_RES (14)..(14): Any L- or D-natural amino acid and any non-natural amino acid; see specification as filed for detailed description of substitutions, R-groups and preferred embodiments
  MOD_RES (18)..(21): Any L- or D-natural or non-natural amino acid, and this range may encompass 1 or 4 residues; see specification as filed for detailed description of substitutions, R-groups and preferred embodiments
  c-term may be amidated

SEQ ID NO: 530 - protein, 34 aa, Artificial Sequence; identical to SEQ ID NO: 332
  Description of Artificial Sequence: Synthetic peptide
  MOD_RES (16)..(16): Any L- or D-natural amino acid and any non-natural amino acid; see specification as filed for detailed description of substitutions, R-groups and preferred embodiments
  MOD_RES (18)..(21): Any L- or D-natural or non-natural amino acid, and this range may encompass 1 or 4 residues; see specification as filed for detailed description of substitutions, R-groups and preferred embodiments
  c-term may be amidated

SEQ ID NO: 531 - protein, 34 aa, Artificial Sequence; identical to SEQ ID NO: 333
  Description of Artificial Sequence: Synthetic peptide
  MOD_RES (1)..(1): Any L- or D-natural amino acid and any non-natural amino acid; see specification as filed for detailed description of substitutions, R-groups and preferred embodiments
  MOD_RES (9)..(9): Any L- or D-natural amino acid and any non-natural amino acid; see specification as filed for detailed description of substitutions, R-groups and preferred embodiments
  MOD_RES (11)..(11): Any L- or D-natural amino acid and any non-natural amino acid; see specification as filed for detailed description of substitutions, R-groups and preferred embodiments
  MOD_RES (16)..(16): Any L- or D-natural amino acid and any non-natural amino acid; see specification as filed for detailed description of substitutions, R-groups and preferred embodiments
  MOD_RES (18)..(21): Any L- or D-natural or non-natural amino acid, and this range may encompass 1 or 4 residues; see specification as filed for detailed description of substitutions, R-groups and preferred embodiments
  c-term may be amidated

SEQ ID NO: 532 - protein, 34 aa, Artificial Sequence; identical to SEQ ID NO: 334
  Description of Artificial Sequence: Synthetic peptide
  MOD_RES (2)..(2): Any L- or D-natural amino acid and any non-natural amino acid; see specification as filed for detailed description of substitutions, R-groups and preferred embodiments
  MOD_RES (9)..(9): Any L- or D-natural amino acid and any non-natural amino acid; see specification as filed for detailed description of substitutions, R-groups and preferred embodiments
  MOD_RES (11)..(11): Any L- or D-natural amino acid and any non-natural amino acid; see specification as filed for detailed description of substitutions, R-groups and preferred embodiments
  MOD_RES (16)..(16): Any L- or D-natural amino acid and any non-natural amino acid; see specification as filed for detailed description of substitutions, R-groups and preferred embodiments
  MOD_RES (18)..(21): Any L- or D-natural or non-natural amino acid, and this range may encompass 1 or 4 residues; see specification as filed for detailed description of substitutions, R-groups and preferred embodiments
  c-term may be amidated

SEQ ID NO: 533 - protein, 34 aa, Artificial Sequence; identical to SEQ ID NO: 335
  Description of Artificial Sequence: Synthetic peptide
  MOD_RES (3)..(3): Any L- or D-natural amino acid and any non-natural amino acid; see specification as filed for detailed description of substitutions, R-groups and preferred embodiments
  MOD_RES (9)..(9): Any L- or D-natural amino acid and any non-natural amino acid; see specification as filed for detailed description of substitutions, R-groups and preferred embodiments
  MOD_RES (11)..(11): Any L- or D-natural amino acid and any non-natural amino acid; see specification as filed for detailed description of substitutions, R-groups and preferred embodiments
  MOD_RES (16)..(16): Any L- or D-natural amino acid and any non-natural amino acid; see specification as filed for detailed description of substitutions, R-groups and preferred embodiments
  MOD_RES (18)..(21): Any L- or D-natural or non-natural amino acid, and this range may encompass 1 or 4 residues; see specification as filed for detailed description of substitutions, R-groups and preferred embodiments
  c-term may be amidated

SEQ ID NO: 534 - protein, 34 aa, Artificial Sequence; identical to SEQ ID NO: 336
  Description of Artificial Sequence: Synthetic peptide
  MOD_RES (4)..(4): Any L- or D-natural amino acid and any non-natural amino acid; see specification as filed for detailed description of substitutions, R-groups and preferred embodiments
  MOD_RES (9)..(9): Any L- or D-natural amino acid and any non-natural amino acid; see specification as filed for detailed description of substitutions, R-groups and preferred embodiments
  MOD_RES (11)..(11): Any L- or D-natural amino acid and any non-natural amino acid; see specification as filed for detailed description of substitutions, R-groups and preferred embodiments
  MOD_RES (16)..(16): Any L- or D-natural amino acid and any non-natural amino acid; see specification as filed for detailed description of substitutions, R-groups and preferred embodiments
  MOD_RES (18)..(21): Any L- or D-natural or non-natural amino acid, and this range may encompass 1 or 4 residues; see specification as filed for detailed description of substitutions, R-groups and preferred embodiments
  c-term may be amidated

SEQ ID NO: 535 - protein, 34 aa, Artificial Sequence; identical to SEQ ID NO: 337
  Description of Artificial Sequence: Synthetic peptide
  MOD_RES (5)..(5): Any L- or D-natural amino acid and any non-natural amino acid; see specification as filed for detailed description of substitutions, R-groups and preferred embodiments
  MOD_RES (9)..(9): Any L- or D-natural amino acid and any non-natural amino acid; see specification as filed for detailed description of substitutions, R-groups and preferred embodiments
  MOD_RES (11)..(11): Any L- or D-natural amino acid and any non-natural amino acid; see specification as filed for detailed description of substitutions, R-groups and preferred embodiments
  MOD_RES (16)..(16): Any L- or D-natural amino acid and any non-natural amino acid; see specification as filed for detailed description of substitutions, R-groups and preferred embodiments
  MOD_RES (18)..(21): Any L- or D-natural or non-natural amino acid, and this range may encompass 1 or 4 residues; see specification as filed for detailed description of substitutions, R-groups and preferred embodiments
  c-term may be amidated

SEQ ID NO: 536 - protein, 34 aa, Artificial Sequence; identical to SEQ ID NO: 338
  Description of Artificial Sequence: Synthetic peptide
  MOD_RES (6)..(6): Any L- or D-natural amino acid and any non-natural amino acid; see specification as filed for detailed description of substitutions, R-groups and preferred embodiments
  MOD_RES (9)..(9): Any L- or D-natural amino acid and any non-natural amino acid; see specification as filed for detailed description of substitutions, R-groups and preferred embodiments
  MOD_RES (11)..(11): Any L- or D-natural amino acid and any non-natural amino acid; see specification as filed for detailed description of substitutions, R-groups and preferred embodiments
  MOD_RES (16)..(16): Any L- or D-natural amino acid and any non-natural amino acid; see specification as filed for detailed description of substitutions, R-groups and preferred embodiments
  MOD_RES (18)..(21): Any L- or D-natural or non-natural amino acid, and this range may encompass 1 or 4 residues; see specification as filed for detailed description of substitutions, R-groups and preferred embodiments
  c-term may be amidated

SEQ ID NO: 537 - protein, 34 aa, Artificial Sequence; identical to SEQ ID NO: 339
  Description of Artificial Sequence: Synthetic peptide
  MOD_RES (7)..(7): Any L- or D-natural amino acid and any non-natural amino acid; see specification as filed for detailed description of substitutions, R-groups and preferred embodiments
  MOD_RES (9)..(9): Any L- or D-natural amino acid and any non-natural amino acid; see specification as filed for detailed description of substitutions, R-groups and preferred embodiments
  MOD_RES (11)..(11): Any L- or D-natural amino acid and any non-natural amino acid; see specification as filed for detailed description of substitutions, R-groups and preferred embodiments
  MOD_RES (16)..(16): Any L- or D-natural amino acid and any non-natural amino acid; see specification as filed for detailed description of substitutions, R-groups and preferred embodiments
  MOD_RES (18)..(21): Any L- or D-natural or non-natural amino acid, and this range may encompass 1 or 4 residues; see specification as filed for detailed description of substitutions, R-groups and preferred embodiments
  c-term may be amidated

SEQ ID NO: 538 - protein, 34 aa, Artificial Sequence; identical to SEQ ID NO: 340
  Description of Artificial Sequence: Synthetic peptide
  MOD_RES (8)..(9): Any L- or D-natural amino acid and any non-natural amino acid; see specification as filed for detailed description of substitutions, R-groups and preferred embodiments
  MOD_RES (11)..(11): Any L- or D-natural amino acid and any non-natural amino acid; see specification as filed for detailed description of substitutions, R-groups and preferred embodiments
  MOD_RES (16)..(16): Any L- or D-natural amino acid and any non-natural amino acid; see specification as filed for detailed description of substitutions, R-groups and preferred embodiments
  MOD_RES (18)..(21): Any L- or D-natural or non-natural amino acid, and this range may encompass 1 or 4 residues; see specification as filed for detailed description of substitutions, R-groups and preferred embodiments
  c-term may be amidated

SEQ ID NO: 539 - protein, 34 aa, Artificial Sequence; identical to SEQ ID NO: 341
  Description of Artificial Sequence: Synthetic peptide
  MOD_RES (17)..(17): Any L- or D-natural amino acid and any non-natural amino acid; see specification as filed for detailed description of substitutions, R-groups and preferred embodiments
  MOD_RES (18)..(21): Any L- or D-natural or non-natural amino acid, and this range may encompass 1 or 4 residues; see specification as filed for detailed description of substitutions, R-groups and preferred embodiments
  c-term may be amidated

SEQ ID NO: 540 - protein, 34 aa, Artificial Sequence; identical to SEQ ID NO: 342
  Description of Artificial Sequence: Synthetic peptide
  MOD_RES (1)..(1): Any L- or D-natural amino acid and any non-natural amino acid; see specification as filed for detailed description of substitutions, R-groups and preferred embodiments
  MOD_RES (9)..(9): Any L- or D-natural amino acid and any non-natural amino acid; see specification as filed for detailed description of substitutions, R-groups and preferred embodiments
  MOD_RES (11)..(11): Any L- or D-natural amino acid and any non-natural amino acid; see specification as filed for detailed description of substitutions, R-groups and preferred embodiments
  MOD_RES (17)..(17): Any L- or D-natural amino acid and any non-natural amino acid; see specification as filed for detailed description of substitutions, R-groups and preferred embodiments
  MOD_RES (18)..(21): Any L- or D-natural or non-natural amino acid, and this range may encompass 1 or 4 residues; see specification as filed for detailed description of substitutions, R-groups and preferred embodiments
  c-term may be amidated

SEQ ID NO: 541 - protein, 34 aa, Artificial Sequence; identical to SEQ ID NO: 343
  Description of Artificial Sequence: Synthetic peptide
  MOD_RES (2)..(2): Any L- or D-natural amino acid and any non-natural amino acid; see specification as filed for detailed description of substitutions, R-groups and preferred embodiments
  MOD_RES (9)..(9): Any L- or D-natural amino acid and any non-natural amino acid; see specification as filed for detailed description of substitutions, R-groups and preferred embodiments
  MOD_RES (11)..(11): Any L- or D-natural amino acid and any non-natural amino acid; see specification as filed for detailed description of substitutions, R-groups and preferred embodiments
  MOD_RES (17)..(17): Any L- or D-natural amino acid and any non-natural amino acid; see specification as filed for detailed description of substitutions, R-groups and preferred embodiments
  MOD_RES (18)..(21): Any L- or D-natural or non-natural amino acid, and this range may encompass 1 or 4 residues; see specification as filed for detailed description of substitutions, R-groups and preferred embodiments
  c-term may be amidated

SEQ ID NO: 542 - protein, 34 aa, Artificial Sequence; identical to SEQ ID NO: 344
  Description of Artificial Sequence: Synthetic peptide
  MOD_RES (3)..(3): Any L- or D-natural amino acid and any non-natural amino acid; see specification as filed for detailed description of substitutions, R-groups and preferred embodiments
  MOD_RES (9)..(9): Any L- or D-natural amino acid and any non-natural amino acid; see specification as filed for detailed description of substitutions, R-groups and preferred embodiments
  MOD_RES (11)..(11): Any L- or D-natural amino acid and any non-natural amino acid; see specification as filed for detailed description of substitutions, R-groups and preferred embodiments
  MOD_RES (17)..(17): Any L- or D-natural amino acid and any non-natural amino acid; see specification as filed for detailed description of substitutions, R-groups and preferred embodiments
  MOD_RES (18)..(21): Any L- or D-natural or non-natural amino acid, and this range may encompass 1 or 4 residues; see specification as filed for detailed description of substitutions, R-groups and preferred embodiments
  c-term may be amidated

SEQ ID NO: 543 - protein, 34 aa, Artificial Sequence; identical to SEQ ID NO: 345
  Description of Artificial Sequence: Synthetic peptide
  MOD_RES (4)..(4): Any L- or D-natural amino acid and any non-natural amino acid; see specification as filed for detailed description of substitutions, R-groups and preferred embodiments
  MOD_RES (9)..(9): Any L- or D-natural amino acid and any non-natural amino acid; see specification as filed for detailed description of substitutions, R-groups and preferred embodiments
  MOD_RES (11)..(11): Any L- or D-natural amino acid and any non-natural amino acid; see specification as filed for detailed description of substitutions, R-groups and preferred embodiments
  MOD_RES (17)..(17): Any L- or D-natural amino acid and any non-natural amino acid; see specification as filed for detailed description of substitutions, R-groups and preferred embodiments
  MOD_RES (18)..(21): Any L- or D-natural or non-natural amino acid, and this range may encompass 1 or 4 residues; see specification as filed for detailed description of substitutions, R-groups and preferred embodiments
  c-term may be amidated

SEQ ID NO: 544 - protein, 34 aa, Artificial Sequence; identical to SEQ ID NO: 346
  Description of Artificial Sequence: Synthetic peptide
  MOD_RES (5)..(5): Any L- or D-natural amino acid and any non-natural amino acid; see specification as filed for detailed description of substitutions, R-groups and preferred embodiments
  MOD_RES (9)..(9): Any L- or D-natural amino acid and any non-natural amino acid; see specification as filed for detailed description of substitutions, R-groups and preferred embodiments
  MOD_RES (11)..(11): Any L- or D-natural amino acid and any non-natural amino acid; see specification as filed for detailed description of substitutions, R-groups and preferred embodiments
  MOD_RES (17)..(17): Any L- or D-natural amino acid and any non-natural amino acid; see specification as filed for detailed description of substitutions, R-groups and preferred embodiments
  MOD_RES (18)..(21): Any L- or D-natural or non-natural amino acid, and this range may encompass 1 or 4 residues; see specification as filed for detailed description of substitutions, R-groups and preferred embodiments
  c-term may be amidated

SEQ ID NO: 545 - protein, 34 aa, Artificial Sequence; identical to SEQ ID NO: 347
  Description of Artificial Sequence: Synthetic peptide
  MOD_RES (6)..(6): Any L- or D-natural amino acid and any non-natural amino acid; see specification as filed for detailed description of substitutions, R-groups and preferred embodiments
  MOD_RES (9)..(9): Any L- or D-natural amino acid and any non-natural amino acid; see specification as filed for detailed description of substitutions, R-groups and preferred embodiments
  MOD_RES (11)..(11): Any L- or D-natural amino acid and any non-natural amino acid; see specification as filed for detailed description of substitutions, R-groups and preferred embodiments
  MOD_RES (17)..(17): Any L- or D-natural amino acid and any non-natural amino acid; see specification as filed for detailed description of substitutions, R-groups and preferred embodiments
  MOD_RES (18)..(21): Any L- or D-natural or non-natural amino acid, and this range may encompass 1 or 4 residues; see specification as filed for detailed description of substitutions, R-groups and preferred embodiments
  c-term may be amidated

SEQ ID NO: 546 - protein, 34 aa, Artificial Sequence; identical to SEQ ID NO: 348
  Description of Artificial Sequence: Synthetic peptide
  MOD_RES (7)..(7): Any L- or D-natural amino acid and any non-natural amino acid; see specification as filed for detailed description of substitutions, R-groups and preferred embodiments
  MOD_RES (9)..(9): Any L- or D-natural amino acid and any non-natural amino acid; see specification as filed for detailed description of substitutions, R-groups and preferred embodiments
  MOD_RES (11)..(11): Any L- or D-natural amino acid and any non-natural amino acid; see specification as filed for detailed description of substitutions, R-groups and preferred embodiments
  MOD_RES (17)..(17): Any L- or D-natural amino acid and any non-natural amino acid; see specification as filed for detailed description of substitutions, R-groups and preferred embodiments
  MOD_RES (18)..(21): Any L- or D-natural or non-natural amino acid, and this range may encompass 1 or 4 residues; see specification as filed for detailed description of substitutions, R-groups and preferred embodiments
  c-term may be amidated

SEQ ID NO: 547 - skipped

SEQ ID NO: 548 - protein, 34 aa, Artificial Sequence; identical to SEQ ID NO: 349
  Description of Artificial Sequence: Synthetic peptide
  MOD_RES (8)..(9): Any L- or D-natural amino acid and any non-natural amino acid; see specification as filed for detailed description of substitutions, R-groups and preferred embodiments
  MOD_RES (11)..(11): Any L- or D-natural amino acid and any non-natural amino acid; see specification as filed for detailed description of substitutions, R-groups and preferred embodiments
  MOD_RES (17)..(17): Any L- or D-natural amino acid and any non-natural amino acid; see specification as filed for detailed description of substitutions, R-groups and preferred embodiments
  MOD_RES (18)..(21): Any L- or D-natural or non-natural amino acid, and this range may encompass 1 or 4 residues; see specification as filed for detailed description of substitutions, R-groups and preferred embodiments
  c-term may be amidated

SEQ ID NO: 549 - protein, 31 aa, Artificial Sequence; identical to SEQ ID NO: 224
  Description of Artificial Sequence: Synthetic peptide
  MOD_RES (15)..(18): Any L- or D-natural or non-natural amino acid, and this range may encompass 1 or 4 residues; see specification as filed for detailed description of substitutions, R-groups and preferred embodiments
  c-term may be amidated

SEQ ID NO: 550 - protein, 31 aa, Artificial Sequence; identical to SEQ ID NO: 225
  Description of Artificial Sequence: Synthetic peptide
  MOD_RES (1)..(1): Any L- or D-natural amino acid and any non-natural amino acid; see specification as filed for detailed description of substitutions, R-groups and preferred embodiments
  MOD_RES (9)..(9): Any L- or D-natural amino acid and any non-natural amino acid; see specification as filed for detailed description of substitutions, R-groups and preferred embodiments
  MOD_RES (11)..(11): Any L- or D-natural amino acid and any non-natural amino acid; see specification as filed for detailed description of substitutions, R-groups and preferred embodiments
  MOD_RES (15)..(18): Any L- or D-natural or non-natural amino acid, and this range may encompass 1 or 4 residues; see specification as filed for detailed description of substitutions, R-groups and preferred embodiments
  c-term may be amidated

SEQ ID NO: 551 - protein, 31 aa, Artificial Sequence; identical to SEQ ID NO: 226
  Description of Artificial Sequence: Synthetic peptide
  MOD_RES (2)..(2): Any L- or D-natural amino acid and any non-natural amino acid; see specification as filed for detailed description of substitutions, R-groups and preferred embodiments
  MOD_RES (9)..(9): Any L- or D-natural amino acid and any non-natural amino acid; see specification as filed for detailed description of substitutions, R-groups and preferred embodiments
  MOD_RES (11)..(11): Any L- or D-natural amino acid and any non-natural amino acid; see specification as filed for detailed description of substitutions, R-groups and preferred embodiments
  MOD_RES (15)..(18): Any L- or D-natural or non-natural amino acid, and this range may encompass 1 or 4 residues; see specification as filed for detailed description of substitutions, R-groups and preferred embodiments
  c-term may be amidated

SEQ ID NO: 552 - protein, 31 aa, Artificial Sequence; identical to SEQ ID NO: 227
  Description of Artificial Sequence: Synthetic peptide
  MOD_RES (3)..(3): Any L- or D-natural amino acid and any non-natural amino acid; see specification as filed for detailed description of substitutions, R-groups and preferred embodiments
  MOD_RES (9)..(9): Any L- or D-natural amino acid and any non-natural amino acid; see specification as filed for detailed description of substitutions, R-groups and preferred embodiments
  MOD_RES (11)..(11): Any L- or D-natural amino acid and any non-natural amino acid; see specification as filed for detailed description of substitutions, R-groups and preferred embodiments
  MOD_RES (15)..(18): Any L- or D-natural or non-natural amino acid, and this range may encompass 1 or 4 residues; see specification as filed for detailed description of substitutions, R-groups and preferred embodiments
  c-term may be amidated

SEQ ID NO: 553 - protein, 31 aa, Artificial Sequence; identical to SEQ ID NO: 228
  Description of Artificial Sequence: Synthetic peptide
  MOD_RES (4)..(4): Any L- or D-natural amino acid and any non-natural amino acid; see specification as filed for detailed description of substitutions, R-groups and preferred embodiments
  MOD_RES (9)..(9): Any L- or D-natural amino acid and any non-natural amino acid; see specification as filed for detailed description of substitutions, R-groups and preferred embodiments
  MOD_RES (11)..(11): Any L- or D-natural amino acid and any non-natural amino acid; see specification as filed for detailed description of substitutions, R-groups and preferred embodiments
  MOD_RES (15)..(18): Any L- or D-natural or non-natural amino acid, and this range may encompass 1 or 4 residues; see specification as filed for detailed description of substitutions, R-groups and preferred embodiments
  c-term may be amidated

SEQ ID NO: 554 - protein, 31 aa, Artificial Sequence; identical to SEQ ID NO: 229
  Description of Artificial Sequence: Synthetic peptide
  MOD_RES (5)..(5): Any L- or D-natural amino acid and any non-natural amino acid; see specification as filed for detailed description of substitutions, R-groups and preferred embodiments
  MOD_RES (9)..(9): Any L- or D-natural amino acid and any non-natural amino acid; see specification as filed for detailed description of substitutions, R-groups and preferred embodiments
  MOD_RES (11)..(11): Any L- or D-natural amino acid and any non-natural amino acid; see specification as filed for detailed description of substitutions, R-groups and preferred embodiments
  MOD_RES (15)..(18): Any L- or D-natural or non-natural amino acid, and this range may encompass 1 or 4 residues; see specification as filed for detailed description of substitutions, R-groups and preferred embodiments
  c-term may be amidated

SEQ ID NO: 555 - protein, 31 aa, Artificial Sequence; identical to SEQ ID NO: 230
  Description of Artificial Sequence: Synthetic peptide
  MOD_RES (6)..(6): Any L- or D-natural amino acid and any non-natural amino acid; see specification as filed for detailed description of substitutions, R-groups and preferred embodiments
  MOD_RES (9)..(9): Any L- or D-natural amino acid and any non-natural amino acid; see specification as filed for detailed description of substitutions, R-groups and preferred embodiments
  MOD_RES (11)..(11): Any L- or D-natural amino acid and any non-natural amino acid; see specification as filed for detailed description of substitutions, R-groups and preferred embodiments
  MOD_RES (15)..(18): Any L- or D-natural or non-natural amino acid, and this range may encompass 1 or 4 residues; see specification as filed for detailed description of substitutions, R-groups and preferred embodiments
  c-term may be amidated

SEQ ID NO: 556 - protein, 31 aa, Artificial Sequence; identical to SEQ ID NO: 231
  Description of Artificial Sequence: Synthetic peptide
  MOD_RES (7)..(7): Any L- or D-natural amino acid and any non-natural amino acid; see specification as filed for detailed description of substitutions, R-groups and preferred embodiments
  MOD_RES (9)..(9): Any L- or D-natural amino acid and any non-natural amino acid; see specification as filed for detailed description of substitutions, R-groups and preferred embodiments
  MOD_RES (11)..(11): Any L- or D-natural amino acid and any non-natural amino acid; see specification as filed for detailed description of substitutions, R-groups and preferred embodiments
  MOD_RES (15)..(18): Any L- or D-natural or non-natural amino acid, and this range may encompass 1 or 4 residues; see specification as filed for detailed description of substitutions, R-groups and preferred embodiments
  c-term may be amidated

SEQ ID NO: 557 - protein, 31 aa, Artificial Sequence; identical to SEQ ID NO: 232
  Description of Artificial Sequence: Synthetic peptide
  MOD_RES (8)..(9): Any L- or D-natural amino acid and any non-natural amino acid; see specification as filed for detailed description of substitutions, R-groups and preferred embodiments
  MOD_RES (11)..(11): Any L- or D-natural amino acid and any non-natural amino acid; see specification as filed for detailed description of substitutions, R-groups and preferred embodiments
  MOD_RES (15)..(18): Any L- or D-natural or non-natural amino acid, and this range may encompass 1 or 4 residues; see specification as filed for detailed description of substitutions, R-groups and preferred embodiments
  c-term may be amidated

SEQ ID NO: 558 - protein, 31 aa, Artificial Sequence; identical to SEQ ID NO: 233
  Description of Artificial Sequence: Synthetic peptide
  MOD_RES (12)..(12): Any L- or D-natural amino acid and any non-natural amino acid; see specification as filed for detailed description of substitutions, R-groups and preferred embodiments
  MOD_RES (15)..(18): Any L- or D-natural or non-natural amino acid, and this range may encompass 1 or 4 residues; see specification as filed for detailed description of substitutions, R-groups and preferred embodiments
  c-term may be amidated

SEQ ID NO: 559 - protein, 31 aa, Artificial Sequence; identical to SEQ ID NO: 234
  Description of Artificial Sequence: Synthetic peptide
  MOD_RES (1)..(1): Any L- or D-natural amino acid and any non-natural amino acid; see specification as filed for detailed description of substitutions, R-groups and preferred embodiments
  MOD_RES (9)..(9): Any L- or D-natural amino acid and any non-natural amino acid; see specification as filed for detailed description of substitutions, R-groups and preferred embodiments
  MOD_RES (11)..(12): Any L- or D-natural amino acid and any non-natural amino acid; see specification as filed for detailed description of substitutions, R-groups and preferred embodiments
  MOD_RES (15)..(18): Any L- or D-natural or non-natural amino acid, and this range may encompass 1 or 4 residues; see specification as filed for detailed description of substitutions, R-groups and preferred embodiments
  c-term may be amidated

SEQ ID NO: 560 - protein, 31 aa, Artificial Sequence; identical to SEQ ID NO: 235
  Description of Artificial Sequence: Synthetic peptide
  MOD_RES (2)..(2): Any L- or D-natural amino acid and any non-natural amino acid; see specification as filed for detailed description of substitutions, R-groups and preferred embodiments
  MOD_RES (9)..(9): Any L- or D-natural amino acid and any non-natural amino acid; see specification as filed for detailed description of substitutions, R-groups and preferred embodiments
  MOD_RES (11)..(12): Any L- or D-natural amino acid and any non-natural amino acid; see specification as filed for detailed description of substitutions, R-groups and preferred embodiments
  MOD_RES (15)..(18): Any L- or D-natural or non-natural amino acid, and this range may encompass 1 or 4 residues; see specification as filed for detailed description of substitutions, R-groups and preferred embodiments
  c-term may be amidated

SEQ ID NO: 561 - protein, 31 aa, Artificial Sequence; identical to SEQ ID NO: 236
  Description of Artificial Sequence: Synthetic peptide
  MOD_RES (3)..(3): Any L- or D-natural amino acid and any non-natural amino acid; see specification as filed for detailed description of substitutions, R-groups and preferred embodiments
  MOD_RES (9)..(9): Any L- or D-natural amino acid and any non-natural amino acid; see specification as filed for detailed description of substitutions, R-groups and preferred embodiments
  MOD_RES (11)..(12): Any L- or D-natural amino acid and any non-natural amino acid; see specification as filed for detailed description of substitutions, R-groups and preferred embodiments
  MOD_RES (15)..(18): Any L- or D-natural or non-natural amino acid, and this range may encompass 1 or 4 residues; see specification as filed for detailed description of substitutions, R-groups and preferred embodiments
  c-term may be amidated

SEQ ID NO: 562 - protein, 31 aa, Artificial Sequence; identical to SEQ ID NO: 237
  Description of Artificial Sequence: Synthetic peptide
  MOD_RES (4)..(4): Any L- or D-natural amino acid and any non-natural amino acid; see specification as filed for detailed description of substitutions, R-groups and preferred embodiments
  MOD_RES (9)..(9): Any L- or D-natural amino acid and any non-natural amino acid; see specification as filed for detailed description of substitutions, R-groups and preferred embodiments
  MOD_RES (11)..(12): Any L- or D-natural amino acid and any non-natural amino acid; see specification as filed for detailed description of substitutions, R-groups and preferred embodiments
  MOD_RES (15)..(18): Any L- or D-natural or non-natural amino acid, and this range may encompass 1 or 4 residues; see specification as filed for detailed description of substitutions, R-groups and preferred embodiments
  c-term may be amidated

SEQ ID NO: 563 - protein, 31 aa, Artificial Sequence; identical to SEQ ID NO: 238
  Description of Artificial Sequence: Synthetic peptide
  MOD_RES (5)..(5): Any L- or D-natural amino acid and any non-natural amino acid; see specification as filed for detailed description of substitutions, R-groups and preferred embodiments
  MOD_RES (9)..(9): Any L- or D-natural amino acid and any non-natural amino acid; see specification as filed for detailed description of substitutions, R-groups and preferred embodiments
  MOD_RES (11)..(12): Any L- or D-natural amino acid and any non-natural amino acid; see specification as filed for detailed description of substitutions, R-groups and preferred embodiments
  MOD_RES (15)..(18): Any L- or D-natural or non-natural amino acid, and this range may encompass 1 or 4 residues; see specification as filed for detailed description of substitutions, R-groups and preferred embodiments
  c-term may be amidated

SEQ ID NO: 564 - protein, 31 aa, Artificial Sequence; identical to SEQ ID NO: 239
  Description of Artificial Sequence: Synthetic peptide
  MOD_RES (6)..(6): Any L- or D-natural amino acid and any non-natural amino acid; see specification as filed for detailed description of substitutions, R-groups and preferred embodiments
  MOD_RES (9)..(9): Any L- or D-natural amino acid and any non-natural amino acid; see specification as filed for detailed description of substitutions, R-groups and preferred embodiments
  MOD_RES (11)..(12): Any L- or D-natural amino acid and any non-natural amino acid; see specification as filed for detailed description of substitutions, R-groups and preferred embodiments
  MOD_RES (15)..(18): Any L- or D-natural or non-natural amino acid, and this range may encompass 1 or 4 residues; see specification as filed for detailed description of substitutions, R-groups and preferred embodiments
  c-term may be amidated

SEQ ID NO: 565 - protein, 31 aa, Artificial Sequence; identical to SEQ ID NO: 240
  Description of Artificial Sequence: Synthetic peptide
  MOD_RES (7)..(7): Any L- or D-natural amino acid and any non-natural amino acid; see specification as filed for detailed description of substitutions, R-groups and preferred embodiments
  MOD_RES (9)..(9): Any L- or D-natural amino acid and any non-natural amino acid; see specification as filed for detailed description of substitutions, R-groups and preferred embodiments
  MOD_RES (11)..(12): Any L- or D-natural amino acid and any non-natural amino acid; see specification as filed for detailed description of substitutions, R-groups and preferred embodiments
  MOD_RES (15)..(18): Any L- or D-natural or non-natural amino acid, and this range may encompass 1 or 4 residues; see specification as filed for detailed description of substitutions, R-groups and preferred embodiments
  c-term may be amidated

SEQ ID NO: 566 - protein, 31 aa, Artificial Sequence; identical to SEQ ID NO: 241
  Description of Artificial Sequence: Synthetic peptide
  MOD_RES (8)..(9): Any L- or D-natural amino acid and any non-natural amino acid; see specification as filed for detailed description of substitutions, R-groups and preferred embodiments
  MOD_RES (11)..(12): Any L- or D-natural amino acid and any non-natural amino acid; see specification as filed for detailed description of substitutions, R-groups and preferred embodiments
  MOD_RES (15)..(18): Any L- or D-natural or non-natural amino acid, and this range may encompass 1 or 4 residues; see specification as filed for detailed description of substitutions, R-groups and preferred embodiments
  c-term may be amidated

SEQ ID NO: 567 - protein, 31 aa, Artificial Sequence; identical to SEQ ID NO: 242
  Description of Artificial Sequence: Synthetic peptide
  MOD_RES (13)..(13): Any L- or D-natural amino acid and any non-natural amino acid; see specification as filed for detailed description of substitutions, R-groups and preferred embodiments
  MOD_RES (15)..(18): Any L- or D-natural or non-natural amino acid, and this range may encompass 1 or 4 residues; see specification as filed for detailed description of substitutions, R-groups and preferred embodiments
  c-term may be amidated

SEQ ID NO: 568 - protein, 31 aa, Artificial Sequence; identical to SEQ ID NO: 243
  Description of Artificial Sequence: Synthetic peptide
  MOD_RES (1)..(1): Any L- or D-natural amino acid and any non-natural amino acid; see specification as filed for detailed description of substitutions, R-groups and preferred embodiments
  MOD_RES (9)..(9): Any L- or D-natural amino acid and any non-natural amino acid; see specification as filed for detailed description of substitutions, R-groups and preferred embodiments
  MOD_RES (11)..(11): Any L- or D-natural amino acid and any non-natural amino acid; see specification as filed for detailed description of substitutions, R-groups and preferred embodiments
  MOD_RES (13)..(13): Any L- or D-natural amino acid and any non-natural amino acid; see specification as filed for detailed description of substitutions, R-groups and preferred embodiments
  MOD_RES (15)..(18): Any L- or D-natural or non-natural amino acid, and this range may encompass 1 or 4 residues; see specification as filed for detailed description of substitutions, R-groups and preferred embodiments
  c-term may be amidated

SEQ ID NO: 569 - protein, 31 aa, Artificial Sequence; identical to SEQ ID NO: 244
  Description of Artificial Sequence: Synthetic peptide
  MOD_RES (2)..(2): Any L- or D-natural amino acid and any non-natural amino acid; see specification as filed for detailed description of substitutions, R-groups and preferred embodiments
  MOD_RES (9)..(9): Any L- or D-natural amino acid and any non-natural amino acid; see specification as filed for detailed description of substitutions, R-groups and preferred embodiments
  MOD_RES (11)..(11): Any L- or D-natural amino acid and any non-natural amino acid; see specification as filed for detailed description of substitutions, R-groups and preferred embodiments
  MOD_RES (13)..(13): Any L- or D-natural amino acid and any non-natural amino acid; see specification as filed for detailed description of substitutions, R-groups and preferred embodiments
  MOD_RES (15)..(18): Any L- or D-natural or non-natural amino acid, and this range may encompass 1 or 4 residues; see specification as filed for detailed description of substitutions, R-groups and preferred embodiments
  c-term may be amidated

SEQ ID NO: 570 - protein, 31 aa, Artificial Sequence; identical to SEQ ID NO: 245
  Description of Artificial Sequence: Synthetic peptide
  MOD_RES (3)..(3): Any L- or D-natural amino acid and any non-natural amino acid; see specification as filed for detailed description of substitutions, R-groups and preferred embodiments
  MOD_RES (9)..(9): Any L- or D-natural amino acid and any non-natural amino acid; see specification as filed for detailed description of substitutions, R-groups and preferred embodiments
  MOD_RES (11)..(11): Any L- or D-natural amino acid and any non-natural amino acid; see specification as filed for detailed description of substitutions, R-groups and preferred embodiments
  MOD_RES (13)..(13): Any L- or D-natural amino acid and any non-natural amino acid; see specification as filed for detailed description of substitutions, R-groups and preferred embodiments
  MOD_RES (15)..(18): Any L- or D-natural or non-natural amino acid, and this range may encompass 1 or 4 residues; see specification as filed for detailed description of substitutions, R-groups and preferred embodiments
  c-term may be amidated

SEQ ID NO: 571 - protein, 31 aa, Artificial Sequence; identical to SEQ ID NO: 246
  Description of Artificial Sequence: Synthetic peptide
  MOD_RES (4)..(4): Any L- or D-natural amino acid and any non-natural amino acid; see specification as filed for detailed description of substitutions, R-groups and preferred embodiments
  MOD_RES (9)..(9): Any L- or D-natural amino acid and any non-natural amino acid; see specification as filed for detailed description of substitutions, R-groups and preferred embodiments
  MOD_RES (11)..(11): Any L- or D-natural amino acid and any non-natural amino acid; see specification as filed for detailed description of substitutions, R-groups and preferred embodiments
  MOD_RES (13)..(13): Any L- or D-natural amino acid and any non-natural amino acid; see specification as filed for detailed description of substitutions, R-groups and preferred embodiments
  MOD_RES (15)..(18): Any L- or D-natural or non-natural amino acid, and this range may encompass 1 or 4 residues; see specification as filed for detailed description of substitutions, R-groups and preferred embodiments
  c-term may be amidated

SEQ ID NO: 572 - protein, 31 aa, Artificial Sequence; identical to SEQ ID NO: 247
  Description of Artificial Sequence: Synthetic peptide
  MOD_RES (5)..(5): Any L- or D-natural amino acid and any non-natural amino acid; see specification as filed for detailed description of substitutions, R-groups and preferred embodiments
  MOD_RES (9)..(9): Any L- or D-natural amino acid and any non-natural amino acid; see specification as filed for detailed description of substitutions, R-groups and preferred embodiments
  MOD_RES (11)..(11): Any L- or D-natural amino acid and any non-natural amino acid; see specification as filed for detailed description of substitutions, R-groups and preferred embodiments
  MOD_RES (13)..(13): Any L- or D-natural amino acid and any non-natural amino acid; see specification as filed for detailed description of substitutions, R-groups and preferred embodiments
  MOD_RES (15)..(18): Any L- or D-natural or non-natural amino acid, and this range may encompass 1 or 4 residues; see specification as filed for detailed description of substitutions, R-groups and preferred embodiments
  c-term may be amidated

SEQ ID NO: 573 - protein, 31 aa, Artificial Sequence; identical to SEQ ID NO: 248
  Description of Artificial Sequence: Synthetic peptide
  MOD_RES (6)..(6): Any L- or D-natural amino acid and any non-natural amino acid; see specification as filed for detailed description of substitutions, R-groups and preferred embodiments
  MOD_RES (9)..(9): Any L- or D-natural amino acid and any non-natural amino acid; see specification as filed for detailed description of substitutions, R-groups and preferred embodiments
  MOD_RES (11)..(11): Any L- or D-natural amino acid and any non-natural amino acid; see specification as filed for detailed description of substitutions, R-groups and preferred embodiments
  MOD_RES (13)..(13): Any L- or D-natural amino acid and any non-natural amino acid; see specification as filed for detailed description of substitutions, R-groups and preferred embodiments
  MOD_RES (15)..(18): Any L- or D-natural or non-natural amino acid, and this range may encompass 1 or 4 residues; see specification as filed for detailed description of substitutions, R-groups and preferred embodiments
  c-term may be amidated

SEQ ID NO: 574 - protein, 31 aa, Artificial Sequence; identical to SEQ ID NO: 249
  Description of Artificial Sequence: Synthetic peptide
  MOD_RES (7)..(7): Any L- or D-natural amino acid and any non-natural amino acid; see specification as filed for detailed description of substitutions, R-groups and preferred embodiments
  MOD_RES (9)..(9): Any L- or D-natural amino acid and any non-natural amino acid; see specification as filed for detailed description of substitutions, R-groups and preferred embodiments
  MOD_RES (11)..(11): Any L- or D-natural amino acid and any non-natural amino acid; see specification as filed for detailed description of substitutions, R-groups and preferred embodiments
  MOD_RES (13)..(13): Any L- or D-natural amino acid and any non-natural amino acid; see specification as filed for detailed description of substitutions, R-groups and preferred embodiments
  MOD_RES (15)..(18): Any L- or D-natural or non-natural amino acid, and this range may encompass 1 or 4 residues; see specification as filed for detailed description of substitutions, R-groups and preferred embodiments
  c-term may be amidated

SEQ ID NO: 575 - protein, 31 aa, Artificial Sequence; identical to SEQ ID NO: 250
  Description of Artificial Sequence: Synthetic peptide
  MOD_RES (8)..(9): Any L- or D-natural amino acid and any non-natural amino acid; see specification as filed for detailed description of substitutions, R-groups and preferred embodiments
  MOD_RES (11)..(11): Any L- or D-natural amino acid and any non-natural amino acid; see specification as filed for detailed description of substitutions, R-groups and preferred embodiments
  MOD_RES (13)..(13): Any L- or D-natural amino acid and any non-natural amino acid; see specification as filed for detailed description of substitutions, R-groups and preferred embodiments
  MOD_RES (15)..(18): Any L- or D-natural or non-natural amino acid, and this range may encompass 1 or 4 residues; see specification as filed for detailed description of substitutions, R-groups and preferred embodiments
  c-term may be amidated

SEQ ID NO: 576 - protein, 31 aa, Artificial Sequence; identical to SEQ ID NO: 251
  Description of Artificial Sequence: Synthetic peptide
  MOD_RES (14)..(14): Any L- or D-natural amino acid and any non-natural amino acid; see specification as filed for detailed description of substitutions, R-groups and preferred embodiments
  MOD_RES (15)..(18): Any L- or D-natural or non-natural amino acid, and this range may encompass 1 or 4 residues; see specification as filed for detailed description of substitutions, R-groups and preferred embodiments
  c-term may be amidated

SEQ ID NO: 577 - protein, 31 aa, Artificial Sequence; identical to SEQ ID NO: 252
  Description of Artificial Sequence: Synthetic peptide
  MOD_RES (1)..(1): Any L- or D-natural amino acid and any non-natural amino acid; see specification as filed for detailed description of substitutions, R-groups and preferred embodiments
  MOD_RES (9)..(9): Any L- or D-natural amino acid and any non-natural amino acid; see specification as filed for detailed description of substitutions, R-groups and preferred embodiments
  MOD_RES (11)..(11): Any L- or D-natural amino acid and any non-natural amino acid; see specification as filed for detailed description of substitutions, R-groups and preferred embodiments
  MOD_RES (14)..(14): Any L- or D-natural amino acid and any non-natural amino acid; see specification as filed for detailed description of substitutions, R-groups and preferred embodiments
  MOD_RES (15)..(18): Any L- or D-natural or non-natural amino acid, and this range may encompass 1 or 4 residues; see specification as filed for detailed description of substitutions, R-groups and preferred embodiments
  c-term may be amidated

SEQ ID NO: 578 - protein, 31 aa, Artificial Sequence; identical to SEQ ID NO: 253
  Description of Artificial Sequence: Synthetic peptide
  MOD_RES (2)..(2): Any L- or D-natural amino acid and any non-natural amino acid; see specification as filed for detailed description of substitutions, R-groups and preferred embodiments
  MOD_RES (9)..(9): Any L- or D-natural amino acid and any non-natural amino acid; see specification as filed for detailed description of substitutions, R-groups and preferred embodiments
  MOD_RES (11)..(11): Any L- or D-natural amino acid and any non-natural amino acid; see specification as filed for detailed description of substitutions, R-groups and preferred embodiments
  MOD_RES (14)..(14): Any L- or D-natural amino acid and any non-natural amino acid; see specification as filed for detailed description of substitutions, R-groups and preferred embodiments
  MOD_RES (15)..(18): Any L- or D-natural or non-natural amino acid, and this range may encompass 1 or 4 residues; see specification as filed for detailed description of substitutions, R-groups and preferred embodiments
  c-term may be amidated

SEQ ID NO: 579 - protein, 31 aa, Artificial Sequence; identical to SEQ ID NO: 254
  Description of Artificial Sequence: Synthetic peptide
  MOD_RES (3)..(3): Any L- or D-natural amino acid and any non-natural amino acid; see specification as filed for detailed description of substitutions, R-groups and preferred embodiments
  MOD_RES (9)..(9): Any L- or D-natural amino acid and any non-natural amino acid; see specification as filed for detailed description of substitutions, R-groups and preferred embodiments
  MOD_RES (11)..(11): Any L- or D-natural amino acid and any non-natural amino acid; see specification as filed for detailed description of substitutions, R-groups and preferred embodiments
  MOD_RES (14)..(14): Any L- or D-natural amino acid and any non-natural amino acid; see specification as filed for detailed description of substitutions, R-groups and preferred embodiments
  MOD_RES (15)..(18): Any L- or D-natural or non-natural amino acid, and this range may encompass 1 or 4 residues; see specification as filed for detailed description of substitutions, R-groups and preferred embodiments
  c-term may be amidated

SEQ ID NO: 580 - protein, 31 aa, Artificial Sequence; identical to SEQ ID NO: 255
  Description of Artificial Sequence: Synthetic peptide
  MOD_RES (4)..(4): Any L- or D-natural amino acid and any non-natural amino acid; see specification as filed for detailed description of substitutions, R-groups and preferred embodiments
  MOD_RES (9)..(9): Any L- or D-natural amino acid and any non-natural amino acid; see specification as filed for detailed description of substitutions, R-groups and preferred embodiments
  MOD_RES (11)..(11): Any L- or D-natural amino acid and any non-natural amino acid; see specification as filed for detailed description of substitutions, R-groups and preferred embodiments
  MOD_RES (14)..(14): Any L- or D-natural amino acid and any non-natural amino acid; see specification as filed for detailed description of substitutions, R-groups and preferred embodiments
  MOD_RES (15)..(18): Any L- or D-natural or non-natural amino acid, and this range may encompass 1 or 4 residues; see specification as filed for detailed description of substitutions, R-groups and preferred embodiments
  c-term may be amidated

SEQ ID NO: 581 - protein, 31 aa, Artificial Sequence; identical to SEQ ID NO: 256
  Description of Artificial Sequence: Synthetic peptide
  MOD_RES (5)..(5): Any L- or D-natural amino acid and any non-natural amino acid; see specification as filed for detailed description of substitutions, R-groups and preferred embodiments
  MOD_RES (9)..(9): Any L- or D-natural amino acid and any non-natural amino acid; see specification as filed for detailed description of substitutions, R-groups and preferred embodiments
  MOD_RES (11)..(11): Any L- or D-natural amino acid and any non-natural amino acid; see specification as filed for detailed description of substitutions, R-groups and preferred embodiments
  MOD_RES (14)..(14): Any L- or D-natural amino acid and any non-natural amino acid; see specification as filed for detailed description of substitutions, R-groups and preferred embodiments
  MOD_RES (15)..(18): Any L- or D-natural or non-natural amino acid, and this range may encompass 1 or 4 residues; see specification as filed for detailed description of substitutions, R-groups and preferred embodiments
  c-term may be amidated

SEQ ID NO: 582 - protein, 31 aa, Artificial Sequence; identical to SEQ ID NO: 257
  Description of Artificial Sequence: Synthetic peptide
  MOD_RES (6)..(6): Any L- or D-natural amino acid and any non-natural amino acid; see specification as filed for detailed description of substitutions, R-groups and preferred embodiments
  MOD_RES (9)..(9): Any L- or D-natural amino acid and any non-natural amino acid; see specification as filed for detailed description of substitutions, R-groups and preferred embodiments
  MOD_RES (11)..(11): Any L- or D-natural amino acid and any non-natural amino acid; see specification as filed for detailed description of substitutions, R-groups and preferred embodiments
  MOD_RES (14)..(14): Any L- or D-natural amino acid and any non-natural amino acid; see specification as filed for detailed description of substitutions, R-groups and preferred embodiments
  MOD_RES (15)..(18): Any L- or D-natural or non-natural amino acid, and this range may encompass 1 or 4 residues; see specification as filed for detailed description of substitutions, R-groups and preferred embodiments
  c-term may be amidated

SEQ ID NO: 583 - protein, 31 aa, Artificial Sequence; identical to SEQ ID NO: 258
  Description of Artificial Sequence: Synthetic peptide
  MOD_RES (7)..(7): Any L- or D-natural amino acid and any non-natural amino acid; see specification as filed for detailed description of substitutions, R-groups and preferred embodiments
  MOD_RES (9)..(9): Any L- or D-natural amino acid and any non-natural amino acid; see specification as filed for detailed description of substitutions, R-groups and preferred embodiments
  MOD_RES (11)..(11): Any L- or D-natural amino acid and any non-natural amino acid; see specification as filed for detailed description of substitutions, R-groups and preferred embodiments
  MOD_RES (14)..(14): Any L- or D-natural amino acid and any non-natural amino acid; see specification as filed for detailed description of substitutions, R-groups and preferred embodiments
  MOD_RES (15)..(18): Any L- or D-natural or non-natural amino acid, and this range may encompass 1 or 4 residues; see specification as filed for detailed description of substitutions, R-groups and preferred embodiments
  c-term may be amidated

SEQ ID NO: 584 - protein, 31 aa, Artificial Sequence; identical to SEQ ID NO: 259
  Description of Artificial Sequence: Synthetic peptide
  MOD_RES (8)..(9): Any L- or D-natural amino acid and any non-natural amino acid; see specification as filed for detailed description of substitutions, R-groups and preferred embodiments
  MOD_RES (11)..(11): Any L- or D-natural amino acid and any non-natural amino acid; see specification as filed for detailed description of substitutions, R-groups and preferred embodiments
  MOD_RES (14)..(14): Any L- or D-natural amino acid and any non-natural amino acid; see specification as filed for detailed description of substitutions, R-groups and preferred embodiments
  MOD_RES (15)..(18): Any L- or D-natural or non-natural amino acid, and this range may encompass 1 or 4 residues; see specification as filed for detailed description of substitutions, R-groups and preferred embodiments
  c-term may be amidated

SEQ ID NO: 585 - protein, 34 aa, Artificial Sequence; identical to SEQ ID NO: 350
  Description of Artificial Sequence: Synthetic peptide
  MOD_RES (18)..(21): Any L- or D-natural or non-natural amino acid, and this range may encompass 1 or 4 residues; see specification as filed for detailed description of substitutions, R-groups and preferred embodiments
  c-term may be amidated

SEQ ID NO: 586 - protein, 34 aa, Artificial Sequence; identical to SEQ ID NO: 351
  Description of Artificial Sequence: Synthetic peptide
  MOD_RES (1)..(1): Any L- or D-natural amino acid and any non-natural amino acid; see specification as filed for detailed description of substitutions, R-groups and preferred embodiments
  MOD_RES (9)..(9): Any L- or D-natural amino acid and any non-natural amino acid; see specification as filed for detailed description of substitutions, R-groups and preferred embodiments
  MOD_RES (11)..(11): Any L- or D-natural amino acid and any non-natural amino acid; see specification as filed for detailed description of substitutions, R-groups and preferred embodiments
  MOD_RES (18)..(21): Any L- or D-natural or non-natural amino acid, and this range may encompass 1 or 4 residues; see specification as filed for detailed description of substitutions, R-groups and preferred embodiments
  c-term may be amidated

SEQ ID NO: 587 - protein, 34 aa, Artificial Sequence; identical to SEQ ID NO: 352
  Description of Artificial Sequence: Synthetic peptide
  MOD_RES (2)..(2): Any L- or D-natural amino acid and any non-natural amino acid; see specification as filed for detailed description of substitutions, R-groups and preferred embodiments
  MOD_RES (9)..(9): Any L- or D-natural amino acid and any non-natural amino acid; see specification as filed for detailed description of substitutions, R-groups and preferred embodiments
  MOD_RES (11)..(11): Any L- or D-natural amino acid and any non-natural amino acid; see specification as filed for detailed description of substitutions, R-groups and preferred embodiments
  MOD_RES (18)..(21): Any L- or D-natural or non-natural amino acid, and this range may encompass 1 or 4 residues; see specification as filed for detailed description of substitutions, R-groups and preferred embodiments
  c-term may be amidated

SEQ ID NO: 588 - protein, 34 aa, Artificial Sequence; identical to SEQ ID NO: 353
  Description of Artificial Sequence: Synthetic peptide
  MOD_RES (3)..(3): Any L- or D-natural amino acid and any non-natural amino acid; see specification as filed for detailed description of substitutions, R-groups and preferred embodiments
  MOD_RES (9)..(9): Any L- or D-natural amino acid and any non-natural amino acid; see specification as filed for detailed description of substitutions, R-groups and preferred embodiments
  MOD_RES (11)..(11): Any L- or D-natural amino acid and any non-natural amino acid; see specification as filed for detailed description of substitutions, R-groups and preferred embodiments
  MOD_RES (18)..(21): Any L- or D-natural or non-natural amino acid, and this range may encompass 1 or 4 residues; see specification as filed for detailed description of substitutions, R-groups and preferred embodiments
  c-term may be amidated

SEQ ID NO: 589 - protein, 34 aa, Artificial Sequence; identical to SEQ ID NO: 354
  Description of Artificial Sequence: Synthetic peptide
  MOD_RES (4)..(4): Any L- or D-natural amino acid and any non-natural amino acid; see specification as filed for detailed description of substitutions, R-groups and preferred embodiments
  MOD_RES (9)..(9): Any L- or D-natural amino acid and any non-natural amino acid; see specification as filed for detailed description of substitutions, R-groups and preferred embodiments
  MOD_RES (11)..(11): Any L- or D-natural amino acid and any non-natural amino acid; see specification as filed for detailed description of substitutions, R-groups and preferred embodiments
  MOD_RES (18)..(21): Any L- or D-natural or non-natural amino acid, and this range may encompass 1 or 4 residues; see specification as filed for detailed description of substitutions, R-groups and preferred embodiments
  c-term may be amidated

SEQ ID NO: 590 - protein, 34 aa, Artificial Sequence; identical to SEQ ID NO: 355
  Description of Artificial Sequence: Synthetic peptide
  MOD_RES (5)..(5): Any L- or D-natural amino acid and any non-natural amino acid; see specification as filed for detailed description of substitutions, R-groups and preferred embodiments
  MOD_RES (9)..(9): Any L- or D-natural amino acid and any non-natural amino acid; see specification as filed for detailed description of substitutions, R-groups and preferred embodiments
  MOD_RES (11)..(11): Any L- or D-natural amino acid and any non-natural amino acid; see specification as filed for detailed description of substitutions, R-groups and preferred embodiments
  MOD_RES (18)..(21): Any L- or D-natural or non-natural amino acid, and this range may encompass 1 or 4 residues; see specification as filed for detailed description of substitutions, R-groups and preferred embodiments
  c-term may be amidated

SEQ ID NO: 591 - protein, 34 aa, Artificial Sequence; identical to SEQ ID NO: 356
  Description of Artificial Sequence: Synthetic peptide
  MOD_RES (6)..(6): Any L- or D-natural amino acid and any non-natural amino acid; see specification as filed for detailed description of substitutions, R-groups and preferred embodiments
  MOD_RES (9)..(9): Any L- or D-natural amino acid and any non-natural amino acid; see specification as filed for detailed description of substitutions, R-groups and preferred embodiments
  MOD_RES (11)..(11): Any L- or D-natural amino acid and any non-natural amino acid; see specification as filed for detailed description of substitutions, R-groups and preferred embodiments
  MOD_RES (18)..(21): Any L- or D-natural or non-natural amino acid, and this range may encompass 1 or 4 residues; see specification as filed for detailed description of substitutions, R-groups and preferred embodiments
  c-term may be amidated

SEQ ID NO: 592 - protein, 34 aa, Artificial Sequence; identical to SEQ ID NO: 357
  Description of Artificial Sequence: Synthetic peptide
  MOD_RES (7)..(7): Any L- or D-natural amino acid and any non-natural amino acid; see specification as filed for detailed description of substitutions, R-groups and preferred embodiments
  MOD_RES (9)..(9): Any L- or D-natural amino acid and any non-natural amino acid; see specification as filed for detailed description of substitutions, R-groups and preferred embodiments
  MOD_RES (11)..(11): Any L- or D-natural amino acid and any non-natural amino acid; see specification as filed for detailed description of substitutions, R-groups and preferred embodiments
  MOD_RES (18)..(21): Any L- or D-natural or non-natural amino acid, and this range may encompass 1 or 4 residues; see specification as filed for detailed description of substitutions, R-groups and preferred embodiments
  c-term may be amidated

SEQ ID NO: 593 - protein, 34 aa, Artificial Sequence; identical to SEQ ID NO: 358
  Description of Artificial Sequence: Synthetic peptide
  MOD_RES (8)..(9): Any L- or D-natural amino acid and any non-natural amino acid; see specification as filed for detailed description of substitutions, R-groups and preferred embodiments
  MOD_RES (11)..(11): Any L- or D-natural amino acid and any non-natural amino acid; see specification as filed for detailed description of substitutions, R-groups and preferred embodiments
  MOD_RES (18)..(21): Any L- or D-natural or non-natural amino acid, and this range may encompass 1 or 4 residues; see specification as filed for detailed description of substitutions, R-groups and preferred embodiments
  c-term may be amidated

SEQ ID NO: 594 - protein, 34 aa, Artificial Sequence; identical to SEQ ID NO: 359
  Description of Artificial Sequence: Synthetic peptide
  MOD_RES (12)..(12): Any L- or D-natural amino acid and any non-natural amino acid; see specification as filed for detailed description of substitutions, R-groups and preferred embodiments
  MOD_RES (18)..(21): Any L- or D-natural or non-natural amino acid, and this range may encompass 1 or 4 residues; see specification as filed for detailed description of substitutions, R-groups and preferred embodiments
  c-term may be amidated

SEQ ID NO: 595 - protein, 34 aa, Artificial Sequence; identical to SEQ ID NO: 360
  Description of Artificial Sequence: Synthetic peptide
  MOD_RES (1)..(1): Any L- or D-natural amino acid and any non-natural amino acid; see specification as filed for detailed description of substitutions, R-groups and preferred embodiments
  MOD_RES (9)..(9): Any L- or D-natural amino acid and any non-natural amino acid; see specification as filed for detailed description of substitutions, R-groups and preferred embodiments
  MOD_RES (11)..(12): Any L- or D-natural amino acid and any non-natural amino acid; see specification as filed for detailed description of substitutions, R-groups and preferred embodiments
  MOD_RES (18)..(21): Any L- or D-natural or non-natural amino acid, and this range may encompass 1 or 4 residues; see specification as filed for detailed description of substitutions, R-groups and preferred embodiments
  c-term may be amidated

SEQ ID NO: 596 - protein, 34 aa, Artificial Sequence; identical to SEQ ID NO: 361
  Description of Artificial Sequence: Synthetic peptide
  MOD_RES (2)..(2): Any L- or D-natural amino acid and any non-natural amino acid; see specification as filed for detailed description of substitutions, R-groups and preferred embodiments
  MOD_RES (9)..(9): Any L- or D-natural amino acid and any non-natural amino acid; see specification as filed for detailed description of substitutions, R-groups and preferred embodiments
  MOD_RES (11)..(12): Any L- or D-natural amino acid and any non-natural amino acid; see specification as filed for detailed description of substitutions, R-groups and preferred embodiments
  MOD_RES (18)..(21): Any L- or D-natural or non-natural amino acid, and this range may encompass 1 or 4 residues; see specification as filed for detailed description of substitutions, R-groups and preferred embodiments
  c-term may be amidated

SEQ ID NO: 597 - protein, 34 aa, Artificial Sequence; identical to SEQ ID NO: 362
  Description of Artificial Sequence: Synthetic peptide
  MOD_RES (3)..(3): Any L- or D-natural amino acid and any non-natural amino acid; see specification as filed for detailed description of substitutions, R-groups and preferred embodiments
  MOD_RES (9)..(9): Any L- or D-natural amino acid and any non-natural amino acid; see specification as filed for detailed description of substitutions, R-groups and preferred embodiments
  MOD_RES (11)..(12): Any L- or D-natural amino acid and any non-natural amino acid; see specification as filed for detailed description of substitutions, R-groups and preferred embodiments
  MOD_RES (18)..(21): Any L- or D-natural or non-natural amino acid, and this range may encompass 1 or 4 residues; see specification as filed for detailed description of substitutions, R-groups and preferred embodiments
  c-term may be amidated

SEQ ID NO: 598 - protein, 34 aa, Artificial Sequence; identical to SEQ ID NO: 363
  Description of Artificial Sequence: Synthetic peptide
  MOD_RES (4)..(4): Any L- or D-natural amino acid and any non-natural amino acid; see specification as filed for detailed description of substitutions, R-groups and preferred embodiments
  MOD_RES (9)..(9): Any L- or D-natural amino acid and any non-natural amino acid; see specification as filed for detailed description of substitutions, R-groups and preferred embodiments
  MOD_RES (11)..(12): Any L- or D-natural amino acid and any non-natural amino acid; see specification as filed for detailed description of substitutions, R-groups and preferred embodiments
  MOD_RES (18)..(21): Any L- or D-natural or non-natural amino acid, and this range may encompass 1 or 4 residues; see specification as filed for detailed description of substitutions, R-groups and preferred embodiments
  c-term may be amidated

SEQ ID NO: 599 - protein, 34 aa, Artificial Sequence; identical to SEQ ID NO: 364
  Description of Artificial Sequence: Synthetic peptide
  MOD_RES (5)..(5): Any L- or D-natural amino acid and any non-natural amino acid; see specification as filed for detailed description of substitutions, R-groups and preferred embodiments
  MOD_RES (9)..(9): Any L- or D-natural amino acid and any non-natural amino acid; see specification as filed for detailed description of substitutions, R-groups and preferred embodiments
  MOD_RES (11)..(12): Any L- or D-natural amino acid and any non-natural amino acid; see specification as filed for detailed description of substitutions, R-groups and preferred embodiments
  MOD_RES (18)..(21): Any L- or D-natural or non-natural amino acid, and this range may encompass 1 or 4 residues; see specification as filed for detailed description of substitutions, R-groups and preferred embodiments
  c-term may be amidated

SEQ ID NO: 600 - protein, 34 aa, Artificial Sequence; identical to SEQ ID NO: 365
  Description of Artificial Sequence: Synthetic peptide
  MOD_RES (6)..(6): Any L- or D-natural amino acid and any non-natural amino acid; see specification as filed for detailed description of substitutions, R-groups and preferred embodiments
  MOD_RES (9)..(9): Any L- or D-natural amino acid and any non-natural amino acid; see specification as filed for detailed description of substitutions, R-groups and preferred embodiments
  MOD_RES (11)..(12): Any L- or D-natural amino acid and any non-natural amino acid; see specification as filed for detailed description of substitutions, R-groups and preferred embodiments
  MOD_RES (18)..(21): Any L- or D-natural or non-natural amino acid, and this range may encompass 1 or 4 residues; see specification as filed for detailed description of substitutions, R-groups and preferred embodiments
  c-term may be amidated

SEQ ID NO: 601 - protein, 34 aa, Artificial Sequence; identical to SEQ ID NO: 366
  Description of Artificial Sequence: Synthetic peptide
  MOD_RES (7)..(7): Any L- or D-natural amino acid and any non-natural amino acid; see specification as filed for detailed description of substitutions, R-groups and preferred embodiments
  MOD_RES (9)..(9): Any L- or D-natural amino acid and any non-natural amino acid; see specification as filed for detailed description of substitutions, R-groups and preferred embodiments
  MOD_RES (11)..(12): Any L- or D-natural amino acid and any non-natural amino acid; see specification as filed for detailed description of substitutions, R-groups and preferred embodiments
  MOD_RES (18)..(21): Any L- or D-natural or non-natural amino acid, and this range may encompass 1 or 4 residues; see specification as filed for detailed description of substitutions, R-groups and preferred embodiments
  c-term may be amidated

SEQ ID NO: 602 - protein, 34 aa, Artificial Sequence; identical to SEQ ID NO: 367
  Description of Artificial Sequence: Synthetic peptide
  MOD_RES (8)..(9): Any L- or D-natural amino acid and any non-natural amino acid; see specification as filed for detailed description of substitutions, R-groups and preferred embodiments
  MOD_RES (11)..(12): Any L- or D-natural amino acid and any non-natural amino acid; see specification as filed for detailed description of substitutions, R-groups and preferred embodiments
  MOD_RES (18)..(21): Any L- or D-natural or non-natural amino acid, and this range may encompass 1 or 4 residues; see specification as filed for detailed description of substitutions, R-groups and preferred embodiments
  c-term may be amidated

SEQ ID NO: 603 - protein, 34 aa, Artificial Sequence; identical to SEQ ID NO: 368
  Description of Artificial Sequence: Synthetic peptide
  MOD_RES (13)..(13): Any L- or D-natural amino acid and any non-natural amino acid; see specification as filed for detailed description of substitutions, R-groups and preferred embodiments
  MOD_RES (18)..(21): Any L- or D-natural or non-natural amino acid, and this range may encompass 1 or 4 residues; see specification as filed for detailed description of substitutions, R-groups and preferred embodiments
  c-term may be amidated

SEQ ID NO: 604 - protein, 34 aa, Artificial Sequence; identical to SEQ ID NO: 369
  Description of Artificial Sequence: Synthetic peptide
  MOD_RES (1)..(1): Any L- or D-natural amino acid and any non-natural amino acid; see specification as filed for detailed description of substitutions, R-groups and preferred embodiments
  MOD_RES (9)..(9): Any L- or D-natural amino acid and any non-natural amino acid; see specification as filed for detailed description of substitutions, R-groups and preferred embodiments
  MOD_RES (11)..(11): Any L- or D-natural amino acid and any non-natural amino acid; see specification as filed for detailed description of substitutions, R-groups and preferred embodiments
  MOD_RES (13)..(13): Any L- or D-natural amino acid and any non-natural amino acid; see specification as filed for detailed description of substitutions, R-groups and preferred embodiments
  MOD_RES (18)..(21): Any L- or D-natural or non-natural amino acid, and this range may encompass 1 or 4 residues; see specification as filed for detailed description of substitutions, R-groups and preferred embodiments
  c-term may be amidated

SEQ ID NO: 605 - protein, 34 aa, Artificial Sequence; identical to SEQ ID NO: 370
  Description of Artificial Sequence: Synthetic peptide
  MOD_RES (2)..(2): Any L- or D-natural amino acid and any non-natural amino acid; see specification as filed for detailed description of substitutions, R-groups and preferred embodiments
  MOD_RES (9)..(9): Any L- or D-natural amino acid and any non-natural amino acid; see specification as filed for detailed description of substitutions, R-groups and preferred embodiments
  MOD_RES (11)..(11): Any L- or D-natural amino acid and any non-natural amino acid; see specification as filed for detailed description of substitutions, R-groups and preferred embodiments
  MOD_RES (13)..(13): Any L- or D-natural amino acid and any non-natural amino acid; see specification as filed for detailed description of substitutions, R-groups and preferred embodiments
  MOD_RES (18)..(21): Any L- or D-natural or non-natural amino acid, and this range may encompass 1 or 4 residues; see specification as filed for detailed description of substitutions, R-groups and preferred embodiments
  c-term may be amidated

SEQ ID NO: 606 - protein, 34 aa, Artificial Sequence; identical to SEQ ID NO: 371
  Description of Artificial Sequence: Synthetic peptide
  MOD_RES (3)..(3): Any L- or D-natural amino acid and any non-natural amino acid; see specification as filed for detailed description of substitutions, R-groups and preferred embodiments
  MOD_RES (9)..(9): Any L- or D-natural amino acid and any non-natural amino acid; see specification as filed for detailed description of substitutions, R-groups and preferred embodiments
  MOD_RES (11)..(11): Any L- or D-natural amino acid and any non-natural amino acid; see specification as filed for detailed description of substitutions, R-groups and preferred embodiments
  MOD_RES (13)..(13): Any L- or D-natural amino acid and any non-natural amino acid; see specification as filed for detailed description of substitutions, R-groups and preferred embodiments
  MOD_RES (18)..(21): Any L- or D-natural or non-natural amino acid, and this range may encompass 1 or 4 residues; see specification as filed for detailed description of substitutions, R-groups and preferred embodiments
  c-term may be amidated

SEQ ID NO: 607 - protein, 34 aa, Artificial Sequence; identical to SEQ ID NO: 372
  Description of Artificial Sequence: Synthetic peptide
  MOD_RES (4)..(4): Any L- or D-natural amino acid and any non-natural amino acid; see specification as filed for detailed description of substitutions, R-groups and preferred embodiments
  MOD_RES (9)..(9): Any L- or D-natural amino acid and any non-natural amino acid; see specification as filed for detailed description of substitutions, R-groups and preferred embodiments
  MOD_RES (11)..(11): Any L- or D-natural amino acid and any non-natural amino acid; see specification as filed for detailed description of substitutions, R-groups and preferred embodiments
  MOD_RES (13)..(13): Any L- or D-natural amino acid and any non-natural amino acid; see specification as filed for detailed description of substitutions, R-groups and preferred embodiments
  MOD_RES (18)..(21): Any L- or D-natural or non-natural amino acid, and this range may encompass 1 or 4 residues; see specification as filed for detailed description of substitutions, R-groups and preferred embodiments
  c-term may be amidated

SEQ ID NO: 608 - protein, 34 aa, Artificial Sequence; identical to SEQ ID NO: 373
  Description of Artificial Sequence: Synthetic peptide
  MOD_RES (5)..(5): Any L- or D-natural amino acid and any non-natural amino acid; see specification as filed for detailed description of substitutions, R-groups and preferred embodiments
  MOD_RES (9)..(9): Any L- or D-natural amino acid and any non-natural amino acid; see specification as filed for detailed description of substitutions, R-groups and preferred embodiments
  MOD_RES (11)..(11): Any L- or D-natural amino acid and any non-natural amino acid; see specification as filed for detailed description of substitutions, R-groups and preferred embodiments
  MOD_RES (13)..(13): Any L- or D-natural amino acid and any non-natural amino acid; see specification as filed for detailed description of substitutions, R-groups and preferred embodiments
  MOD_RES (18)..(21): Any L- or D-natural or non-natural amino acid, and this range may encompass 1 or 4 residues; see specification as filed for detailed description of substitutions, R-groups and preferred embodiments
  c-term may be amidated

SEQ ID NO: 609 - protein, 34 aa, Artificial Sequence; identical to SEQ ID NO: 374
  Description of Artificial Sequence: Synthetic peptide
  MOD_RES (6)..(6): Any L- or D-natural amino acid and any non-natural amino acid; see specification as filed for detailed description of substitutions, R-groups and preferred embodiments
  MOD_RES (9)..(9): Any L- or D-natural amino acid and any non-natural amino acid; see specification as filed for detailed description of substitutions, R-groups and preferred embodiments
  MOD_RES (11)..(11): Any L- or D-natural amino acid and any non-natural amino acid; see specification as filed for detailed description of substitutions, R-groups and preferred embodiments
  MOD_RES (13)..(13): Any L- or D-natural amino acid and any non-natural amino acid; see specification as filed for detailed description of substitutions, R-groups and preferred embodiments
  MOD_RES (18)..(21): Any L- or D-natural or non-natural amino acid, and this range may encompass 1 or 4 residues; see specification as filed for detailed description of substitutions, R-groups and preferred embodiments
  c-term may be amidated

SEQ ID NO: 610 - protein, 34 aa, Artificial Sequence; identical to SEQ ID NO: 375
  Description of Artificial Sequence: Synthetic peptide
  MOD_RES (7)..(7): Any L- or D-natural amino acid and any non-natural amino acid; see specification as filed for detailed description of substitutions, R-groups and preferred embodiments
  MOD_RES (9)..(9): Any L- or D-natural amino acid and any non-natural amino acid; see specification as filed for detailed description of substitutions, R-groups and preferred embodiments
  MOD_RES (11)..(11): Any L- or D-natural amino acid and any non-natural amino acid; see specification as filed for detailed description of substitutions, R-groups and preferred embodiments
  MOD_RES (13)..(13): Any L- or D-natural amino acid and any non-natural amino acid; see specification as filed for detailed description of substitutions, R-groups and preferred embodiments
  MOD_RES (18)..(21): Any L- or D-natural or non-natural amino acid, and this range may encompass 1 or 4 residues; see specification as filed for detailed description of substitutions, R-groups and preferred embodiments
  c-term may be amidated

SEQ ID NO: 611 - protein, 34 aa, Artificial Sequence; identical to SEQ ID NO: 376
  Description of Artificial Sequence: Synthetic peptide
  MOD_RES (8)..(9): Any L- or D-natural amino acid and any non-natural amino acid; see specification as filed for detailed description of substitutions, R-groups and preferred embodiments
  MOD_RES (11)..(11): Any L- or D-natural amino acid and any non-natural amino acid; see specification as filed for detailed description of substitutions, R-groups and preferred embodiments
  MOD_RES (13)..(13): Any L- or D-natural amino acid and any non-natural amino acid; see specification as filed for detailed description of substitutions, R-groups and preferred embodiments
  MOD_RES (18)..(21): Any L- or D-natural or non-natural amino acid, and this range may encompass 1 or 4 residues; see specification as filed for detailed description of substitutions, R-groups and preferred embodiments
  c-term may be amidated

SEQ ID NO: 612 - protein, 34 aa, Artificial Sequence; identical to SEQ ID NO: 377
  Description of Artificial Sequence: Synthetic peptide
  MOD_RES (14)..(14): Any L- or D-natural amino acid and any non-natural amino acid; see specification as filed for detailed description of substitutions, R-groups and preferred embodiments
  MOD_RES (18)..(21): Any L- or D-natural or non-natural amino acid, and this range may encompass 1 or 4 residues; see specification as filed for detailed description of substitutions, R-groups and preferred embodiments
  c-term may be amidated

SEQ ID NO: 613 - protein, 34 aa, Artificial Sequence; identical to SEQ ID NO: 378
  Description of Artificial Sequence: Synthetic peptide
  MOD_RES (1)..(1): Any L- or D-natural amino acid and any non-natural amino acid; see specification as filed for detailed description of substitutions, R-groups and preferred embodiments
  MOD_RES (9)..(9): Any L- or D-natural amino acid and any non-natural amino acid; see specification as filed for detailed description of substitutions, R-groups and preferred embodiments
  MOD_RES (11)..(11): Any L- or D-natural amino acid and any non-natural amino acid; see specification as filed for detailed description of substitutions, R-groups and preferred embodiments
  MOD_RES (14)..(14): Any L- or D-natural amino acid and any non-natural amino acid; see specification as filed for detailed description of substitutions, R-groups and preferred embodiments
  MOD_RES (18)..(21): Any L- or D-natural or non-natural amino acid, and this range may encompass 1 or 4 residues; see specification as filed for detailed description of substitutions, R-groups and preferred embodiments
  c-term may be amidated

SEQ ID NO: 614 - protein, 34 aa, Artificial Sequence; identical to SEQ ID NO: 379
  Description of Artificial Sequence: Synthetic peptide
  MOD_RES (2)..(2): Any L- or D-natural amino acid and any non-natural amino acid; see specification as filed for detailed description of substitutions, R-groups and preferred embodiments
  MOD_RES (9)..(9): Any L- or D-natural amino acid and any non-natural amino acid; see specification as filed for detailed description of substitutions, R-groups and preferred embodiments
  MOD_RES (11)..(11): Any L- or D-natural amino acid and any non-natural amino acid; see specification as filed for detailed description of substitutions, R-groups and preferred embodiments
  MOD_RES (14)..(14): Any L- or D-natural amino acid and any non-natural amino acid; see specification as filed for detailed description of substitutions, R-groups and preferred embodiments
  MOD_RES (18)..(21): Any L- or D-natural or non-natural amino acid, and this range may encompass 1 or 4 residues; see specification as filed for detailed description of substitutions, R-groups and preferred embodiments
  c-term may be amidated

SEQ ID NO: 615 - protein, 34 aa, Artificial Sequence; identical to SEQ ID NO: 380
  Description of Artificial Sequence: Synthetic peptide
  MOD_RES (3)..(3): Any L- or D-natural amino acid and any non-natural amino acid; see specification as filed for detailed description of substitutions, R-groups and preferred embodiments
  MOD_RES (9)..(9): Any L- or D-natural amino acid and any non-natural amino acid; see specification as filed for detailed description of substitutions, R-groups and preferred embodiments
  MOD_RES (11)..(11): Any L- or D-natural amino acid and any non-natural amino acid; see specification as filed for detailed description of substitutions, R-groups and preferred embodiments
  MOD_RES (14)..(14): Any L- or D-natural amino acid and any non-natural amino acid; see specification as filed for detailed description of substitutions, R-groups and preferred embodiments
  MOD_RES (18)..(21): Any L- or D-natural or non-natural amino acid, and this range may encompass 1 or 4 residues; see specification as filed for detailed description of substitutions, R-groups and preferred embodiments
  c-term may be amidated

SEQ ID NO: 616 - protein, 34 aa, Artificial Sequence; identical to SEQ ID NO: 381
  Description of Artificial Sequence: Synthetic peptide
  MOD_RES (4)..(4): Any L- or D-natural amino acid and any non-natural amino acid; see specification as filed for detailed description of substitutions, R-groups and preferred embodiments
  MOD_RES (9)..(9): Any L- or D-natural amino acid and any non-natural amino acid; see specification as filed for detailed description of substitutions, R-groups and preferred embodiments
  MOD_RES (11)..(11): Any L- or D-natural amino acid and any non-natural amino acid; see specification as filed for detailed description of substitutions, R-groups and preferred embodiments
  MOD_RES (14)..(14): Any L- or D-natural amino acid and any non-natural amino acid; see specification as filed for detailed description of substitutions, R-groups and preferred embodiments
  MOD_RES (18)..(21): Any L- or D-natural or non-natural amino acid, and this range may encompass 1 or 4 residues; see specification as filed for detailed description of substitutions, R-groups and preferred embodiments
  c-term may be amidated

SEQ ID NO: 617 - protein, 34 aa, Artificial Sequence; identical to SEQ ID NO: 382
  Description of Artificial Sequence: Synthetic peptide
  MOD_RES (5)..(5): Any L- or D-natural amino acid and any non-natural amino acid; see specification as filed for detailed description of substitutions, R-groups and preferred embodiments
  MOD_RES (9)..(9): Any L- or D-natural amino acid and any non-natural amino acid; see specification as filed for detailed description of substitutions, R-groups and preferred embodiments
  MOD_RES (11)..(11): Any L- or D-natural amino acid and any non-natural amino acid; see specification as filed for detailed description of substitutions, R-groups and preferred embodiments
  MOD_RES (14)..(14): Any L- or D-natural amino acid and any non-natural amino acid; see specification as filed for detailed description of substitutions, R-groups and preferred embodiments
  MOD_RES (18)..(21): Any L- or D-natural or non-natural amino acid, and this range may encompass 1 or 4 residues; see specification as filed for detailed description of substitutions, R-groups and preferred embodiments
  c-term may be amidated

SEQ ID NO: 618 - protein, 34 aa, Artificial Sequence; identical to SEQ ID NO: 383
  Description of Artificial Sequence: Synthetic peptide
  MOD_RES (6)..(6): Any L- or D-natural amino acid and any non-natural amino acid; see specification as filed for detailed description of substitutions, R-groups and preferred embodiments
  MOD_RES (9)..(9): Any L- or D-natural amino acid and any non-natural amino acid; see specification as filed for detailed description of substitutions, R-groups and preferred embodiments
  MOD_RES (11)..(11): Any L- or D-natural amino acid and any non-natural amino acid; see specification as filed for detailed description of substitutions, R-groups and preferred embodiments
  MOD_RES (14)..(14): Any L- or D-natural amino acid and any non-natural amino acid; see specification as filed for detailed description of substitutions, R-groups and preferred embodiments
  MOD_RES (18)..(21): Any L- or D-natural or non-natural amino acid, and this range may encompass 1 or 4 residues; see specification as filed for detailed description of substitutions, R-groups and preferred embodiments
  c-term may be amidated

SEQ ID NO: 619 - protein, 34 aa, Artificial Sequence; identical to SEQ ID NO: 384
  Description of Artificial Sequence: Synthetic peptide
  MOD_RES (7)..(7): Any L- or D-natural amino acid and any non-natural amino acid; see specification as filed for detailed description of substitutions, R-groups and preferred embodiments
  MOD_RES (9)..(9): Any L- or D-natural amino acid and any non-natural amino acid; see specification as filed for detailed description of substitutions, R-groups and preferred embodiments
  MOD_RES (11)..(11): Any L- or D-natural amino acid and any non-natural amino acid; see specification as filed for detailed description of substitutions, R-groups and preferred embodiments
  MOD_RES (14)..(14): Any L- or D-natural amino acid and any non-natural amino acid; see specification as filed for detailed description of substitutions, R-groups and preferred embodiments
  MOD_RES (18)..(21): Any L- or D-natural or non-natural amino acid, and this range may encompass 1 or 4 residues; see specification as filed for detailed description of substitutions, R-groups and preferred embodiments
  c-term may be amidated

SEQ ID NO: 620 - protein, 34 aa, Artificial Sequence; identical to SEQ ID NO: 385
  Description of Artificial Sequence: Synthetic peptide
  MOD_RES (8)..(9): Any L- or D-natural amino acid and any non-natural amino acid; see specification as filed for detailed description of substitutions, R-groups and preferred embodiments
  MOD_RES (11)..(11): Any L- or D-natural amino acid and any non-natural amino acid; see specification as filed for detailed description of substitutions, R-groups and preferred embodiments
  MOD_RES (14)..(14): Any L- or D-natural amino acid and any non-natural amino acid; see specification as filed for detailed description of substitutions, R-groups and preferred embodiments
  MOD_RES (18)..(21): Any L- or D-natural or non-natural amino acid, and this range may encompass 1 or 4 residues; see specification as filed for detailed description of substitutions, R-groups and preferred embodiments
  c-term may be amidated

SEQ ID NO: 621 - protein, 34 aa, Artificial Sequence; identical to SEQ ID NO: 386
  Description of Artificial Sequence: Synthetic peptide
  MOD_RES (16)..(16): Any L- or D-natural amino acid and any non-natural amino acid; see specification as filed for detailed description of substitutions, R-groups and preferred embodiments
  MOD_RES (18)..(21): Any L- or D-natural or non-natural amino acid, and this range may encompass 1 or 4 residues; see specification as filed for detailed description of substitutions, R-groups and preferred embodiments
  c-term may be amidated

SEQ ID NO: 622 - protein, 34 aa, Artificial Sequence; identical to SEQ ID NO: 387
  Description of Artificial Sequence: Synthetic peptide
  MOD_RES (1)..(1): Any L- or D-natural amino acid and any non-natural amino acid; see specification as filed for detailed description of substitutions, R-groups and preferred embodiments
  MOD_RES (9)..(9): Any L- or D-natural amino acid and any non-natural amino acid; see specification as filed for detailed description of substitutions, R-groups and preferred embodiments
  MOD_RES (11)..(11): Any L- or D-natural amino acid and any non-natural amino acid; see specification as filed for detailed description of substitutions, R-groups and preferred embodiments
  MOD_RES (16)..(16): Any L- or D-natural amino acid and any non-natural amino acid; see specification as filed for detailed description of substitutions, R-groups and preferred embodiments
  MOD_RES (18)..(21): Any L- or D-natural or non-natural amino acid, and this range may encompass 1 or 4 residues; see specification as filed for detailed description of substitutions, R-groups and preferred embodiments
  c-term may be amidated

SEQ ID NO: 623 - protein, 34 aa, Artificial Sequence; identical to SEQ ID NO: 388
  Description of Artificial Sequence: Synthetic peptide
  MOD_RES (2)..(2): Any L- or D-natural amino acid and any non-natural amino acid; see specification as filed for detailed description of substitutions, R-groups and preferred embodiments
  MOD_RES (9)..(9): Any L- or D-natural amino acid and any non-natural amino acid; see specification as filed for detailed description of substitutions, R-groups and preferred embodiments
  MOD_RES (11)..(11): Any L- or D-natural amino acid and any non-natural amino acid; see specification as filed for detailed description of substitutions, R-groups and preferred embodiments
  MOD_RES (16)..(16): Any L- or D-natural amino acid and any non-natural amino acid; see specification as filed for detailed description of substitutions, R-groups and preferred embodiments
  MOD_RES (18)..(21): Any L- or D-natural or non-natural amino acid, and this range may encompass 1 or 4 residues; see specification as filed for detailed description of substitutions, R-groups and preferred embodiments
  c-term may be amidated

SEQ ID NO: 624 - protein, 34 aa, Artificial Sequence; identical to SEQ ID NO: 389
  Description of Artificial Sequence: Synthetic peptide
  MOD_RES (3)..(3): Any L- or D-natural amino acid and any non-natural amino acid; see specification as filed for detailed description of substitutions, R-groups and preferred embodiments
  MOD_RES (9)..(9): Any L- or D-natural amino acid and any non-natural amino acid; see specification as filed for detailed description of substitutions, R-groups and preferred embodiments
  MOD_RES (11)..(11): Any L- or D-natural amino acid and any non-natural amino acid; see specification as filed for detailed description of substitutions, R-groups and preferred embodiments
  MOD_RES (16)..(16): Any L- or D-natural amino acid and any non-natural amino acid; see specification as filed for detailed description of substitutions, R-groups and preferred embodiments
  MOD_RES (18)..(21): Any L- or D-natural or non-natural amino acid, and this range may encompass 1 or 4 residues; see specification as filed for detailed description of substitutions, R-groups and preferred embodiments
  c-term may be amidated

SEQ ID NO: 625 - protein, 34 aa, Artificial Sequence; identical to SEQ ID NO: 390
  Description of Artificial Sequence: Synthetic peptide
  MOD_RES (4)..(4): Any L- or D-natural amino acid and any non-natural amino acid; see specification as filed for detailed description of substitutions, R-groups and preferred embodiments
  MOD_RES (9)..(9): Any L- or D-natural amino acid and any non-natural amino acid; see specification as filed for detailed description of substitutions, R-groups and preferred embodiments
  MOD_RES (11)..(11): Any L- or D-natural amino acid and any non-natural amino acid; see specification as filed for detailed description of substitutions, R-groups and preferred embodiments
  MOD_RES (16)..(16): Any L- or D-natural amino acid and any non-natural amino acid; see specification as filed for detailed description of substitutions, R-groups and preferred embodiments
  MOD_RES (18)..(21): Any L- or D-natural or non-natural amino acid, and this range may encompass 1 or 4 residues; see specification as filed for detailed description of substitutions, R-groups and preferred embodiments
  c-term may be amidated

SEQ ID NO: 626 - protein, 34 aa, Artificial Sequence; identical to SEQ ID NO: 391
  Description of Artificial Sequence: Synthetic peptide
  MOD_RES (5)..(5): Any L- or D-natural amino acid and any non-natural amino acid; see specification as filed for detailed description of substitutions, R-groups and preferred embodiments
  MOD_RES (9)..(9): Any L- or D-natural amino acid and any non-natural amino acid; see specification as filed for detailed description of substitutions, R-groups and preferred embodiments
  MOD_RES (11)..(11): Any L- or D-natural amino acid and any non-natural amino acid; see specification as filed for detailed description of substitutions, R-groups and preferred embodiments
  MOD_RES (16)..(16): Any L- or D-natural amino acid and any non-natural amino acid; see specification as filed for detailed description of substitutions, R-groups and preferred embodiments
  MOD_RES (18)..(21): Any L- or D-natural or non-natural amino acid, and this range may encompass 1 or 4 residues; see specification as filed for detailed description of substitutions, R-groups and preferred embodiments
  c-term may be amidated

SEQ ID NO: 627 - protein, 34 aa, Artificial Sequence; identical to SEQ ID NO: 392
  Description of Artificial Sequence: Synthetic peptide
  MOD_RES (6)..(6): Any L- or D-natural amino acid and any non-natural amino acid; see specification as filed for detailed description of substitutions, R-groups and preferred embodiments
  MOD_RES (9)..(9): Any L- or D-natural amino acid and any non-natural amino acid; see specification as filed for detailed description of substitutions, R-groups and preferred embodiments
  MOD_RES (11)..(11): Any L- or D-natural amino acid and any non-natural amino acid; see specification as filed for detailed description of substitutions, R-groups and preferred embodiments
  MOD_RES (16)..(16): Any L- or D-natural amino acid and any non-natural amino acid; see specification as filed for detailed description of substitutions, R-groups and preferred embodiments
  MOD_RES (18)..(21): Any L- or D-natural or non-natural amino acid, and this range may encompass 1 or 4 residues; see specification as filed for detailed description of substitutions, R-groups and preferred embodiments
  c-term may be amidated

SEQ ID NO: 628 - protein, 34 aa, Artificial Sequence; identical to SEQ ID NO: 393
  Description of Artificial Sequence: Synthetic peptide
  MOD_RES (7)..(7): Any L- or D-natural amino acid and any non-natural amino acid; see specification as filed for detailed description of substitutions, R-groups and preferred embodiments
  MOD_RES (9)..(9): Any L- or D-natural amino acid and any non-natural amino acid; see specification as filed for detailed description of substitutions, R-groups and preferred embodiments
  MOD_RES (11)..(11): Any L- or D-natural amino acid and any non-natural amino acid; see specification as filed for detailed description of substitutions, R-groups and preferred embodiments
  MOD_RES (16)..(16): Any L- or D-natural amino acid and any non-natural amino acid; see specification as filed for detailed description of substitutions, R-groups and preferred embodiments
  MOD_RES (18)..(21): Any L- or D-natural or non-natural amino acid, and this range may encompass 1 or 4 residues; see specification as filed for detailed description of substitutions, R-groups and preferred embodiments
  c-term may be amidated

SEQ ID NO: 629 - protein, 34 aa, Artificial Sequence; identical to SEQ ID NO: 394
  Description of Artificial Sequence: Synthetic peptide
  MOD_RES (8)..(9): Any L- or D-natural amino acid and any non-natural amino acid; see specification as filed for detailed description of substitutions, R-groups and preferred embodiments
  MOD_RES (11)..(11): Any L- or D-natural amino acid and any non-natural amino acid; see specification as filed for detailed description of substitutions, R-groups and preferred embodiments
  MOD_RES (16)..(16): Any L- or D-natural amino acid and any non-natural amino acid; see specification as filed for detailed description of substitutions, R-groups and preferred embodiments
  MOD_RES (18)..(21): Any L- or D-natural or non-natural amino acid, and this range may encompass 1 or 4 residues; see specification as filed for detailed description of substitutions, R-groups and preferred embodiments
  c-term may be amidated

SEQ ID NO: 630 - protein, 34 aa, Artificial Sequence; identical to SEQ ID NO: 395
  Description of Artificial Sequence: Synthetic peptide
  MOD_RES (17)..(17): Any L- or D-natural amino acid and any non-natural amino acid; see specification as filed for detailed description of substitutions, R-groups and preferred embodiments
  MOD_RES (18)..(21): Any L- or D-natural or non-natural amino acid, and this range may encompass 1 or 4 residues; see specification as filed for detailed description of substitutions, R-groups and preferred embodiments
  c-term may be amidated

SEQ ID NO: 631 - protein, 34 aa, Artificial Sequence; identical to SEQ ID NO: 396
  Description of Artificial Sequence: Synthetic peptide
  MOD_RES (1)..(1): Any L- or D-natural amino acid and any non-natural amino acid; see specification as filed for detailed description of substitutions, R-groups and preferred embodiments
  MOD_RES (9)..(9): Any L- or D-natural amino acid and any non-natural amino acid; see specification as filed for detailed description of substitutions, R-groups and preferred embodiments
  MOD_RES (11)..(11): Any L- or D-natural amino acid and any non-natural amino acid; see specification as filed for detailed description of substitutions, R-groups and preferred embodiments
  MOD_RES (17)..(17): Any L- or D-natural amino acid and any non-natural amino acid; see specification as filed for detailed description of substitutions, R-groups and preferred embodiments
  MOD_RES (18)..(21): Any L- or D-natural or non-natural amino acid, and this range may encompass 1 or 4 residues; see specification as filed for detailed description of substitutions, R-groups and preferred embodiments
  c-term may be amidated

SEQ ID NO: 632 - protein, 34 aa, Artificial Sequence; identical to SEQ ID NO: 397
  Description of Artificial Sequence: Synthetic peptide
  MOD_RES (2)..(2): Any L- or D-natural amino acid and any non-natural amino acid; see specification as filed for detailed description of substitutions, R-groups and preferred embodiments
  MOD_RES (9)..(9): Any L- or D-natural amino acid and any non-natural amino acid; see specification as filed for detailed description of substitutions, R-groups and preferred embodiments
  MOD_RES (11)..(11): Any L- or D-natural amino acid and any non-natural amino acid; see specification as filed for detailed description of substitutions, R-groups and preferred embodiments
  MOD_RES (17)..(17): Any L- or D-natural amino acid and any non-natural amino acid; see specification as filed for detailed description of substitutions, R-groups and preferred embodiments
  MOD_RES (18)..(21): Any L- or D-natural or non-natural amino acid, and this range may encompass 1 or 4 residues; see specification as filed for detailed description of substitutions, R-groups and preferred embodiments
  c-term may be amidated

SEQ ID NO: 633 - protein, 34 aa, Artificial Sequence; identical to SEQ ID NO: 398
  Description of Artificial Sequence: Synthetic peptide
  MOD_RES (3)..(3): Any L- or D-natural amino acid and any non-natural amino acid; see specification as filed for detailed description of substitutions, R-groups and preferred embodiments
  MOD_RES (9)..(9): Any L- or D-natural amino acid and any non-natural amino acid; see specification as filed for detailed description of substitutions, R-groups and preferred embodiments
  MOD_RES (11)..(11): Any L- or D-natural amino acid and any non-natural amino acid; see specification as filed for detailed description of substitutions, R-groups and preferred embodiments
  MOD_RES (17)..(17): Any L- or D-natural amino acid and any non-natural amino acid; see specification as filed for detailed description of substitutions, R-groups and preferred embodiments
  MOD_RES (18)..(21): Any L- or D-natural or non-natural amino acid, and this range may encompass 1 or 4 residues; see specification as filed for detailed description of substitutions, R-groups and preferred embodiments
  c-term may be amidated

SEQ ID NO: 634 - protein, 34 aa, Artificial Sequence; identical to SEQ ID NO: 399
  Description of Artificial Sequence: Synthetic peptide
  MOD_RES (4)..(4): Any L- or D-natural amino acid and any non-natural amino acid; see specification as filed for detailed description of substitutions, R-groups and preferred embodiments
  MOD_RES (9)..(9): Any L- or D-natural amino acid and any non-natural amino acid; see specification as filed for detailed description of substitutions, R-groups and preferred embodiments
  MOD_RES (11)..(11): Any L- or D-natural amino acid and any non-natural amino acid; see specification as filed for detailed description of substitutions, R-groups and preferred embodiments
  MOD_RES (17)..(17): Any L- or D-natural amino acid and any non-natural amino acid; see specification as filed for detailed description of substitutions, R-groups and preferred embodiments
  MOD_RES (18)..(21): Any L- or D-natural or non-natural amino acid, and this range may encompass 1 or 4 residues; see specification as filed for detailed description of substitutions, R-groups and preferred embodiments
  c-term may be amidated

SEQ ID NO: 635 - protein, 34 aa, Artificial Sequence; identical to SEQ ID NO: 400
  Description of Artificial Sequence: Synthetic peptide
  MOD_RES (5)..(5): Any L- or D-natural amino acid and any non-natural amino acid; see specification as filed for detailed description of substitutions, R-groups and preferred embodiments
  MOD_RES (9)..(9): Any L- or D-natural amino acid and any non-natural amino acid; see specification as filed for detailed description of substitutions, R-groups and preferred embodiments
  MOD_RES (11)..(11): Any L- or D-natural amino acid and any non-natural amino acid; see specification as filed for detailed description of substitutions, R-groups and preferred embodiments
  MOD_RES (17)..(17): Any L- or D-natural amino acid and any non-natural amino acid; see specification as filed for detailed description of substitutions, R-groups and preferred embodiments
  MOD_RES (18)..(21): Any L- or D-natural or non-natural amino acid, and this range may encompass 1 or 4 residues; see specification as filed for detailed description of substitutions, R-groups and preferred embodiments
  c-term may be amidated

SEQ ID NO: 636 - protein, 34 aa, Artificial Sequence; identical to SEQ ID NO: 401
  Description of Artificial Sequence: Synthetic peptide
  MOD_RES (6)..(6): Any L- or D-natural amino acid and any non-natural amino acid; see specification as filed for detailed description of substitutions, R-groups and preferred embodiments
  MOD_RES (9)..(9): Any L- or D-natural amino acid and any non-natural amino acid; see specification as filed for detailed description of substitutions, R-groups and preferred embodiments
  MOD_RES (11)..(11): Any L- or D-natural amino acid and any non-natural amino acid; see specification as filed for detailed description of substitutions, R-groups and preferred embodiments
  MOD_RES (17)..(17): Any L- or D-natural amino acid and any non-natural amino acid; see specification as filed for detailed description of substitutions, R-groups and preferred embodiments
  MOD_RES (18)..(21): Any L- or D-natural or non-natural amino acid, and this range may encompass 1 or 4 residues; see specification as filed for detailed description of substitutions, R-groups and preferred embodiments
  c-term may be amidated

SEQ ID NO: 637 - protein, 34 aa, Artificial Sequence; identical to SEQ ID NO: 402
  Description of Artificial Sequence: Synthetic peptide
  MOD_RES (7)..(7): Any L- or D-natural amino acid and any non-natural amino acid; see specification as filed for detailed description of substitutions, R-groups and preferred embodiments
  MOD_RES (9)..(9): Any L- or D-natural amino acid and any non-natural amino acid; see specification as filed for detailed description of substitutions, R-groups and preferred embodiments
  MOD_RES (11)..(11): Any L- or D-natural amino acid and any non-natural amino acid; see specification as filed for detailed description of substitutions, R-groups and preferred embodiments
  MOD_RES (17)..(17): Any L- or D-natural amino acid and any non-natural amino acid; see specification as filed for detailed description of substitutions, R-groups and preferred embodiments
  MOD_RES (18)..(21): Any L- or D-natural or non-natural amino acid, and this range may encompass 1 or 4 residues; see specification as filed for detailed description of substitutions, R-groups and preferred embodiments
  c-term may be amidated

SEQ ID NO: 638 - protein, 34 aa, Artificial Sequence; identical to SEQ ID NO: 403
  Description of Artificial Sequence: Synthetic peptide
  MOD_RES (8)..(9): Any L- or D-natural amino acid and any non-natural amino acid; see specification as filed for detailed description of substitutions, R-groups and preferred embodiments
  MOD_RES (11)..(11): Any L- or D-natural amino acid and any non-natural amino acid; see specification as filed for detailed description of substitutions, R-groups and preferred embodiments
  MOD_RES (17)..(17): Any L- or D-natural amino acid and any non-natural amino acid; see specification as filed for detailed description of substitutions, R-groups and preferred embodiments
  MOD_RES (18)..(21): Any L- or D-natural or non-natural amino acid, and this range may encompass 1 or 4 residues; see specification as filed for detailed description of substitutions, R-groups and preferred embodiments
  c-term may be amidated

SEQ ID NO: 639 - protein, 31 aa, Artificial Sequence; identical to SEQ ID NO: 260
  Description of Artificial Sequence: Synthetic peptide
  MOD_RES (15)..(18): Any L- or D-natural or non-natural amino acid, and this range may encompass 1 or 4 residues; see specification as filed for detailed description of substitutions, R-groups and preferred embodiments
  c-term may be amidated

SEQ ID NO: 640 - protein, 31 aa, Artificial Sequence; identical to SEQ ID NO: 261
  Description of Artificial Sequence: Synthetic peptide
  MOD_RES (1)..(1): Any L- or D-natural amino acid and any non-natural amino acid; see specification as filed for detailed description of substitutions, R-groups and preferred embodiments
  MOD_RES (9)..(9): Any L- or D-natural amino acid and any non-natural amino acid; see specification as filed for detailed description of substitutions, R-groups and preferred embodiments
  MOD_RES (11)..(11): Any L- or D-natural amino acid and any non-natural amino acid; see specification as filed for detailed description of substitutions, R-groups and preferred embodiments
  MOD_RES (15)..(18): Any L- or D-natural or non-natural amino acid, and this range may encompass 1 or 4 residues; see specification as filed for detailed description of substitutions, R-groups and preferred embodiments
  c-term may be amidated

SEQ ID NO: 641 - protein, 31 aa, Artificial Sequence; identical to SEQ ID NO: 262
  Description of Artificial Sequence: Synthetic peptide
  MOD_RES (2)..(2): Any L- or D-natural amino acid and any non-natural amino acid; see specification as filed for detailed description of substitutions, R-groups and preferred embodiments
  MOD_RES (9)..(9): Any L- or D-natural amino acid and any non-natural amino acid; see specification as filed for detailed description of substitutions, R-groups and preferred embodiments
  MOD_RES (11)..(11): Any L- or D-natural amino acid and any non-natural amino acid; see specification as filed for detailed description of substitutions, R-groups and preferred embodiments
  MOD_RES (15)..(18): Any L- or D-natural or non-natural amino acid, and this range may encompass 1 or 4 residues; see specification as filed for detailed description of substitutions, R-groups and preferred embodiments
  c-term may be amidated

SEQ ID NO: 642 - protein, 31 aa, Artificial Sequence; identical to SEQ ID NO: 263
  Description of Artificial Sequence: Synthetic peptide
  MOD_RES (3)..(3): Any L- or D-natural amino acid and any non-natural amino acid; see specification as filed for detailed description of substitutions, R-groups and preferred embodiments
  MOD_RES (9)..(9): Any L- or D-natural amino acid and any non-natural amino acid; see specification as filed for detailed description of substitutions, R-groups and preferred embodiments
  MOD_RES (11)..(11): Any L- or D-natural amino acid and any non-natural amino acid; see specification as filed for detailed description of substitutions, R-groups and preferred embodiments
  MOD_RES (15)..(18): Any L- or D-natural or non-natural amino acid, and this range may encompass 1 or 4 residues; see specification as filed for detailed description of substitutions, R-groups and preferred embodiments
  c-term may be amidated

SEQ ID NO: 643 - protein, 31 aa, Artificial Sequence; identical to SEQ ID NO: 264
  Description of Artificial Sequence: Synthetic peptide
  MOD_RES (4)..(4): Any L- or D-natural amino acid and any non-natural amino acid; see specification as filed for detailed description of substitutions, R-groups and preferred embodiments
  MOD_RES (9)..(9): Any L- or D-natural amino acid and any non-natural amino acid; see specification as filed for detailed description of substitutions, R-groups and preferred embodiments
  MOD_RES (11)..(11): Any L- or D-natural amino acid and any non-natural amino acid; see specification as filed for detailed description of substitutions, R-groups and preferred embodiments
  MOD_RES (15)..(18): Any L- or D-natural or non-natural amino acid, and this range may encompass 1 or 4 residues; see specification as filed for detailed description of substitutions, R-groups and preferred embodiments
  c-term may be amidated

SEQ ID NO: 644 - protein, 31 aa, Artificial Sequence; identical to SEQ ID NO: 265
  Description of Artificial Sequence: Synthetic peptide
  MOD_RES (5)..(5): Any L- or D-natural amino acid and any non-natural amino acid; see specification as filed for detailed description of substitutions, R-groups and preferred embodiments
  MOD_RES (9)..(9): Any L- or D-natural amino acid and any non-natural amino acid; see specification as filed for detailed description of substitutions, R-groups and preferred embodiments
  MOD_RES (11)..(11): Any L- or D-natural amino acid and any non-natural amino acid; see specification as filed for detailed description of substitutions, R-groups and preferred embodiments
  MOD_RES (15)..(18): Any L- or D-natural or non-natural amino acid, and this range may encompass 1 or 4 residues; see specification as filed for detailed description of substitutions, R-groups and preferred embodiments
  c-term may be amidated

SEQ ID NO: 645 - protein, 31 aa, Artificial Sequence; identical to SEQ ID NO: 266
  Description of Artificial Sequence: Synthetic peptide
  MOD_RES (6)..(6): Any L- or D-natural amino acid and any non-natural amino acid; see specification as filed for detailed description of substitutions, R-groups and preferred embodiments
  MOD_RES (9)..(9): Any L- or D-natural amino acid and any non-natural amino acid; see specification as filed for detailed description of substitutions, R-groups and preferred embodiments
  MOD_RES (11)..(11): Any L- or D-natural amino acid and any non-natural amino acid; see specification as filed for detailed description of substitutions, R-groups and preferred embodiments
  MOD_RES (15)..(18): Any L- or D-natural or non-natural amino acid, and this range may encompass 1 or 4 residues; see specification as filed for detailed description of substitutions, R-groups and preferred embodiments
  c-term may be amidated

SEQ ID NO: 646 - protein, 31 aa, Artificial Sequence; identical to SEQ ID NO: 267
  Description of Artificial Sequence: Synthetic peptide
  MOD_RES (7)..(7): Any L- or D-natural amino acid and any non-natural amino acid; see specification as filed for detailed description of substitutions, R-groups and preferred embodiments
  MOD_RES (9)..(9): Any L- or D-natural amino acid and any non-natural amino acid; see specification as filed for detailed description of substitutions, R-groups and preferred embodiments
  MOD_RES (11)..(11): Any L- or D-natural amino acid and any non-natural amino acid; see specification as filed for detailed description of substitutions, R-groups and preferred embodiments
  MOD_RES (15)..(18): Any L- or D-natural or non-natural amino acid, and this range may encompass 1 or 4 residues; see specification as filed for detailed description of substitutions, R-groups and preferred embodiments
  c-term may be amidated

SEQ ID NO: 647 - protein, 31 aa, Artificial Sequence; identical to SEQ ID NO: 268
  Description of Artificial Sequence: Synthetic peptide
  MOD_RES (8)..(9): Any L- or D-natural amino acid and any non-natural amino acid; see specification as filed for detailed description of substitutions, R-groups and preferred embodiments
  MOD_RES (11)..(11): Any L- or D-natural amino acid and any non-natural amino acid; see specification as filed for detailed description of substitutions, R-groups and preferred embodiments
  MOD_RES (15)..(18): Any L- or D-natural or non-natural amino acid, and this range may encompass 1 or 4 residues; see specification as filed for detailed description of substitutions, R-groups and preferred embodiments
  c-term may be amidated

SEQ ID NO: 648 - protein, 31 aa, Artificial Sequence; identical to SEQ ID NO: 269
  Description of Artificial Sequence: Synthetic peptide
  MOD_RES (12)..(12): Any L- or D-natural amino acid and any non-natural amino acid; see specification as filed for detailed description of substitutions, R-groups and preferred embodiments
  MOD_RES (15)..(18): Any L- or D-natural or non-natural amino acid, and this range may encompass 1 or 4 residues; see specification as filed for detailed description of substitutions, R-groups and preferred embodiments
  c-term may be amidated

SEQ ID NO: 649 - protein, 31 aa, Artificial Sequence; identical to SEQ ID NO: 270
  Description of Artificial Sequence: Synthetic peptide
  MOD_RES (1)..(1): Any L- or D-natural amino acid and any non-natural amino acid; see specification as filed for detailed description of substitutions, R-groups and preferred embodiments
  MOD_RES (9)..(9): Any L- or D-natural amino acid and any non-natural amino acid; see specification as filed for detailed description of substitutions, R-groups and preferred embodiments
  MOD_RES (11)..(12): Any L- or D-natural amino acid and any non-natural amino acid; see specification as filed for detailed description of substitutions, R-groups and preferred embodiments
  MOD_RES (15)..(18): Any L- or D-natural or non-natural amino acid, and this range may encompass 1 or 4 residues; see specification as filed for detailed description of substitutions, R-groups and preferred embodiments
  c-term may be amidated

SEQ ID NO: 650 - protein, 31 aa, Artificial Sequence; identical to SEQ ID NO: 271
  Description of Artificial Sequence: Synthetic peptide
  MOD_RES (2)..(2): Any L- or D-natural amino acid and any non-natural amino acid; see specification as filed for detailed description of substitutions, R-groups and preferred embodiments
  MOD_RES (9)..(9): Any L- or D-natural amino acid and any non-natural amino acid; see specification as filed for detailed description of substitutions, R-groups and preferred embodiments
  MOD_RES (11)..(12): Any L- or D-natural amino acid and any non-natural amino acid; see specification as filed for detailed description of substitutions, R-groups and preferred embodiments
  MOD_RES (15)..(18): Any L- or D-natural or non-natural amino acid, and this range may encompass 1 or 4 residues; see specification as filed for detailed description of substitutions, R-groups and preferred embodiments
  c-term may be amidated

SEQ ID NO: 651 - protein, 31 aa, Artificial Sequence; identical to SEQ ID NO: 272
  Description of Artificial Sequence: Synthetic peptide
  MOD_RES (3)..(3): Any L- or D-natural amino acid and any non-natural amino acid; see specification as filed for detailed description of substitutions, R-groups and preferred embodiments
  MOD_RES (9)..(9): Any L- or D-natural amino acid and any non-natural amino acid; see specification as filed for detailed description of substitutions, R-groups and preferred embodiments
  MOD_RES (11)..(12): Any L- or D-natural amino acid and any non-natural amino acid; see specification as filed for detailed description of substitutions, R-groups and preferred embodiments
  MOD_RES (15)..(18): Any L- or D-natural or non-natural amino acid, and this range may encompass 1 or 4 residues; see specification as filed for detailed description of substitutions, R-groups and preferred embodiments
  c-term may be amidated

SEQ ID NO: 652 - protein, 31 aa, Artificial Sequence; identical to SEQ ID NO: 273
  Description of Artificial Sequence: Synthetic peptide
  MOD_RES (4)..(4): Any L- or D-natural amino acid and any non-natural amino acid; see specification as filed for detailed description of substitutions, R-groups and preferred embodiments
  MOD_RES (9)..(9): Any L- or D-natural amino acid and any non-natural amino acid; see specification as filed for detailed description of substitutions, R-groups and preferred embodiments
  MOD_RES (11)..(12): Any L- or D-natural amino acid and any non-natural amino acid; see specification as filed for detailed description of substitutions, R-groups and preferred embodiments
  MOD_RES (15)..(18): Any L- or D-natural or non-natural amino acid, and this range may encompass 1 or 4 residues; see specification as filed for detailed description of substitutions, R-groups and preferred embodiments
  c-term may be amidated

SEQ ID NO: 653 - protein, 31 aa, Artificial Sequence; identical to SEQ ID NO: 274
  Description of Artificial Sequence: Synthetic peptide
  MOD_RES (5)..(5): Any L- or D-natural amino acid and any non-natural amino acid; see specification as filed for detailed description of substitutions, R-groups and preferred embodiments
  MOD_RES (9)..(9): Any L- or D-natural amino acid and any non-natural amino acid; see specification as filed for detailed description of substitutions, R-groups and preferred embodiments
  MOD_RES (11)..(12): Any L- or D-natural amino acid and any non-natural amino acid; see specification as filed for detailed description of substitutions, R-groups and preferred embodiments
  MOD_RES (15)..(18): Any L- or D-natural or non-natural amino acid, and this range may encompass 1 or 4 residues; see specification as filed for detailed description of substitutions, R-groups and preferred embodiments
  c-term may be amidated

SEQ ID NO: 654 - protein, 31 aa, Artificial Sequence; identical to SEQ ID NO: 275
  Description of Artificial Sequence: Synthetic peptide
  MOD_RES (6)..(6): Any L- or D-natural amino acid and any non-natural amino acid; see specification as filed for detailed description of substitutions, R-groups and preferred embodiments
  MOD_RES (9)..(9): Any L- or D-natural amino acid and any non-natural amino acid; see specification as filed for detailed description of substitutions, R-groups and preferred embodiments
  MOD_RES (11)..(12): Any L- or D-natural amino acid and any non-natural amino acid; see specification as filed for detailed description of substitutions, R-groups and preferred embodiments
  MOD_RES (15)..(18): Any L- or D-natural or non-natural amino acid, and this range may encompass 1 or 4 residues; see specification as filed for detailed description of substitutions, R-groups and preferred embodiments
  c-term may be amidated

SEQ ID NO: 655 - protein, 31 aa, Artificial Sequence; identical to SEQ ID NO: 276
  Description of Artificial Sequence: Synthetic peptide
  MOD_RES (7)..(7): Any L- or D-natural amino acid and any non-natural amino acid; see specification as filed for detailed description of substitutions, R-groups and preferred embodiments
  MOD_RES (9)..(9): Any L- or D-natural amino acid and any non-natural amino acid; see specification as filed for detailed description of substitutions, R-groups and preferred embodiments
  MOD_RES (11)..(12): Any L- or D-natural amino acid and any non-natural amino acid; see specification as filed for detailed description of substitutions, R-groups and preferred embodiments
  MOD_RES (15)..(18): Any L- or D-natural or non-natural amino acid, and this range may encompass 1 or 4 residues; see specification as filed for detailed description of substitutions, R-groups and preferred embodiments
  c-term may be amidated

SEQ ID NO: 656 - protein, 31 aa, Artificial Sequence; identical to SEQ ID NO: 277
  Description of Artificial Sequence: Synthetic peptide
  MOD_RES (8)..(9): Any L- or D-natural amino acid and any non-natural amino acid; see specification as filed for detailed description of substitutions, R-groups and preferred embodiments
  MOD_RES (11)..(12): Any L- or D-natural amino acid and any non-natural amino acid; see specification as filed for detailed description of substitutions, R-groups and preferred embodiments
  MOD_RES (15)..(18): Any L- or D-natural or non-natural amino acid, and this range may encompass 1 or 4 residues; see specification as filed for detailed description of substitutions, R-groups and preferred embodiments
  c-term may be amidated

SEQ ID NO: 657 - protein, 31 aa, Artificial Sequence; identical to SEQ ID NO: 278
  Description of Artificial Sequence: Synthetic peptide
  MOD_RES (13)..(13): Any L- or D-natural amino acid and any non-natural amino acid; see specification as filed for detailed description of substitutions, R-groups and preferred embodiments
  MOD_RES (15)..(18): Any L- or D-natural or non-natural amino acid, and this range may encompass 1 or 4 residues; see specification as filed for detailed description of substitutions, R-groups and preferred embodiments
  c-term may be amidated

SEQ ID NO: 658 - protein, 31 aa, Artificial Sequence; identical to SEQ ID NO: 279
  Description of Artificial Sequence: Synthetic peptide
  MOD_RES (1)..(1): Any L- or D-natural amino acid and any non-natural amino acid; see specification as filed for detailed description of substitutions, R-groups and preferred embodiments
  MOD_RES (9)..(9): Any L- or D-natural amino acid and any non-natural amino acid; see specification as filed for detailed description of substitutions, R-groups and preferred embodiments
  MOD_RES (11)..(11): Any L- or D-natural amino acid and any non-natural amino acid; see specification as filed for detailed description of substitutions, R-groups and preferred embodiments
  MOD_RES (13)..(13): Any L- or D-natural amino acid and any non-natural amino acid; see specification as filed for detailed description of substitutions, R-groups and preferred embodiments
  MOD_RES (15)..(18): Any L- or D-natural or non-natural amino acid, and this range may encompass 1 or 4 residues; see specification as filed for detailed description of substitutions, R-groups and preferred embodiments
  c-term may be amidated

SEQ ID NO: 659 - protein, 31 aa, Artificial Sequence; identical to SEQ ID NO: 280
  Description of Artificial Sequence: Synthetic peptide
  MOD_RES (2)..(2): Any L- or D-natural amino acid and any non-natural amino acid; see specification as filed for detailed description of substitutions, R-groups and preferred embodiments
  MOD_RES (9)..(9): Any L- or D-natural amino acid and any non-natural amino acid; see specification as filed for detailed description of substitutions, R-groups and preferred embodiments
  MOD_RES (11)..(11): Any L- or D-natural amino acid and any non-natural amino acid; see specification as filed for detailed description of substitutions, R-groups and preferred embodiments
  MOD_RES (13)..(13): Any L- or D-natural amino acid and any non-natural amino acid; see specification as filed for detailed description of substitutions, R-groups and preferred embodiments
  MOD_RES (15)..(18): Any L- or D-natural or non-natural amino acid, and this range may encompass 1 or 4 residues; see specification as filed for detailed description of substitutions, R-groups and preferred embodiments
  c-term may be amidated

SEQ ID NO: 660 - protein, 31 aa, Artificial Sequence; identical to SEQ ID NO: 281
  Description of Artificial Sequence: Synthetic peptide
  MOD_RES (3)..(3): Any L- or D-natural amino acid and any non-natural amino acid; see specification as filed for detailed description of substitutions, R-groups and preferred embodiments
  MOD_RES (9)..(9): Any L- or D-natural amino acid and any non-natural amino acid; see specification as filed for detailed description of substitutions, R-groups and preferred embodiments
  MOD_RES (11)..(11): Any L- or D-natural amino acid and any non-natural amino acid; see specification as filed for detailed description of substitutions, R-groups and preferred embodiments
  MOD_RES (13)..(13): Any L- or D-natural amino acid and any non-natural amino acid; see specification as filed for detailed description of substitutions, R-groups and preferred embodiments
  MOD_RES (15)..(18): Any L- or D-natural or non-natural amino acid, and this range may encompass 1 or 4 residues; see specification as filed for detailed description of substitutions, R-groups and preferred embodiments
  c-term may be amidated

SEQ ID NO: 661 - protein, 31 aa, Artificial Sequence; identical to SEQ ID NO: 282
  Description of Artificial Sequence: Synthetic peptide
  MOD_RES (4)..(4): Any L- or D-natural amino acid and any non-natural amino acid; see specification as filed for detailed description of substitutions, R-groups and preferred embodiments
  MOD_RES (9)..(9): Any L- or D-natural amino acid and any non-natural amino acid; see specification as filed for detailed description of substitutions, R-groups and preferred embodiments
  MOD_RES (11)..(11): Any L- or D-natural amino acid and any non-natural amino acid; see specification as filed for detailed description of substitutions, R-groups and preferred embodiments
  MOD_RES (13)..(13): Any L- or D-natural amino acid and any non-natural amino acid; see specification as filed for detailed description of substitutions, R-groups and preferred embodiments
  MOD_RES (15)..(18): Any L- or D-natural or non-natural amino acid, and this range may encompass 1 or 4 residues; see specification as filed for detailed description of substitutions, R-groups and preferred embodiments
  c-term may be amidated

SEQ ID NO: 662 - protein, 31 aa, Artificial Sequence; identical to SEQ ID NO: 283
  Description of Artificial Sequence: Synthetic peptide
  MOD_RES (5)..(5): Any L- or D-natural amino acid and any non-natural amino acid; see specification as filed for detailed description of substitutions, R-groups and preferred embodiments
  MOD_RES (9)..(9): Any L- or D-natural amino acid and any non-natural amino acid; see specification as filed for detailed description of substitutions, R-groups and preferred embodiments
  MOD_RES (11)..(11): Any L- or D-natural amino acid and any non-natural amino acid; see specification as filed for detailed description of substitutions, R-groups and preferred embodiments
  MOD_RES (13)..(13): Any L- or D-natural amino acid and any non-natural amino acid; see specification as filed for detailed description of substitutions, R-groups and preferred embodiments
  MOD_RES (15)..(18): Any L- or D-natural or non-natural amino acid, and this range may encompass 1 or 4 residues; see specification as filed for detailed description of substitutions, R-groups and preferred embodiments
  c-term may be amidated

SEQ ID NO: 663 - protein, 31 aa, Artificial Sequence; identical to SEQ ID NO: 284
  Description of Artificial Sequence: Synthetic peptide
  MOD_RES (6)..(6): Any L- or D-natural amino acid and any non-natural amino acid; see specification as filed for detailed description of substitutions, R-groups and preferred embodiments
  MOD_RES (9)..(9): Any L- or D-natural amino acid and any non-natural amino acid; see specification as filed for detailed description of substitutions, R-groups and preferred embodiments
  MOD_RES (11)..(11): Any L- or D-natural amino acid and any non-natural amino acid; see specification as filed for detailed description of substitutions, R-groups and preferred embodiments
  MOD_RES (13)..(13): Any L- or D-natural amino acid and any non-natural amino acid; see specification as filed for detailed description of substitutions, R-groups and preferred embodiments
  MOD_RES (15)..(18): Any L- or D-natural or non-natural amino acid, and this range may encompass 1 or 4 residues; see specification as filed for detailed description of substitutions, R-groups and preferred embodiments
  c-term may be amidated

SEQ ID NO: 664 - protein, 31 aa, Artificial Sequence; identical to SEQ ID NO: 285
  Description of Artificial Sequence: Synthetic peptide
  MOD_RES (7)..(7): Any L- or D-natural amino acid and any non-natural amino acid; see specification as filed for detailed description of substitutions, R-groups and preferred embodiments
  MOD_RES (9)..(9): Any L- or D-natural amino acid and any non-natural amino acid; see specification as filed for detailed description of substitutions, R-groups and preferred embodiments
  MOD_RES (11)..(11): Any L- or D-natural amino acid and any non-natural amino acid; see specification as filed for detailed description of substitutions, R-groups and preferred embodiments
  MOD_RES (13)..(13): Any L- or D-natural amino acid and any non-natural amino acid; see specification as filed for detailed description of substitutions, R-groups and preferred embodiments
  MOD_RES (15)..(18): Any L- or D-natural or non-natural amino acid, and this range may encompass 1 or 4 residues; see specification as filed for detailed description of substitutions, R-groups and preferred embodiments
  c-term may be amidated

SEQ ID NO: 665 - protein, 31 aa, Artificial Sequence; identical to SEQ ID NO: 286
  Description of Artificial Sequence: Synthetic peptide
  MOD_RES (8)..(9): Any L- or D-natural amino acid and any non-natural amino acid; see specification as filed for detailed description of substitutions, R-groups and preferred embodiments
  MOD_RES (11)..(11): Any L- or D-natural amino acid and any non-natural amino acid; see specification as filed for detailed description of substitutions, R-groups and preferred embodiments
  MOD_RES (13)..(13): Any L- or D-natural amino acid and any non-natural amino acid; see specification as filed for detailed description of substitutions, R-groups and preferred embodiments
  MOD_RES (15)..(18): Any L- or D-natural or non-natural amino acid, and this range may encompass 1 or 4 residues; see specification as filed for detailed description of substitutions, R-groups and preferred embodiments
  c-term may be amidated

SEQ ID NO: 666 - protein, 31 aa, Artificial Sequence; identical to SEQ ID NO: 287
  Description of Artificial Sequence: Synthetic peptide
  MOD_RES (14)..(14): Any L- or D-natural amino acid and any non-natural amino acid; see specification as filed for detailed description of substitutions, R-groups and preferred embodiments
  MOD_RES (15)..(18): Any L- or D-natural or non-natural amino acid, and this range may encompass 1 or 4 residues; see specification as filed for detailed description of substitutions, R-groups and preferred embodiments
  c-term may be amidated

SEQ ID NO: 667 - protein, 31 aa, Artificial Sequence; identical to SEQ ID NO: 288
  Description of Artificial Sequence: Synthetic peptide
  MOD_RES (1)..(1): Any L- or D-natural amino acid and any non-natural amino acid; see specification as filed for detailed description of substitutions, R-groups and preferred embodiments
  MOD_RES (9)..(9): Any L- or D-natural amino acid and any non-natural amino acid; see specification as filed for detailed description of substitutions, R-groups and preferred embodiments
  MOD_RES (11)..(11): Any L- or D-natural amino acid and any non-natural amino acid; see specification as filed for detailed description of substitutions, R-groups and preferred embodiments
  MOD_RES (14)..(14): Any L- or D-natural amino acid and any non-natural amino acid; see specification as filed for detailed description of substitutions, R-groups and preferred embodiments
  MOD_RES (15)..(18): Any L- or D-natural or non-natural amino acid, and this range may encompass 1 or 4 residues; see specification as filed for detailed description of substitutions, R-groups and preferred embodiments
  c-term may be amidated

SEQ ID NO: 668 - protein, 31 aa, Artificial Sequence; identical to SEQ ID NO: 289
  Description of Artificial Sequence: Synthetic peptide
  MOD_RES (2)..(2): Any L- or D-natural amino acid and any non-natural amino acid; see specification as filed for detailed description of substitutions, R-groups and preferred embodiments
  MOD_RES (9)..(9): Any L- or D-natural amino acid and any non-natural amino acid; see specification as filed for detailed description of substitutions, R-groups and preferred embodiments
  MOD_RES (11)..(11): Any L- or D-natural amino acid and any non-natural amino acid; see specification as filed for detailed description of substitutions, R-groups and preferred embodiments
  MOD_RES (14)..(14): Any L- or D-natural amino acid and any non-natural amino acid; see specification as filed for detailed description of substitutions, R-groups and preferred embodiments
  MOD_RES (15)..(18): Any L- or D-natural or non-natural amino acid, and this range may encompass 1 or 4 residues; see specification as filed for detailed description of substitutions, R-groups and preferred embodiments
  c-term may be amidated

SEQ ID NO: 669 - protein, 31 aa, Artificial Sequence; identical to SEQ ID NO: 290
  Description of Artificial Sequence: Synthetic peptide
  MOD_RES (3)..(3): Any L- or D-natural amino acid and any non-natural amino acid; see specification as filed for detailed description of substitutions, R-groups and preferred embodiments
  MOD_RES (9)..(9): Any L- or D-natural amino acid and any non-natural amino acid; see specification as filed for detailed description of substitutions, R-groups and preferred embodiments
  MOD_RES (11)..(11): Any L- or D-natural amino acid and any non-natural amino acid; see specification as filed for detailed description of substitutions, R-groups and preferred embodiments
  MOD_RES (14)..(14): Any L- or D-natural amino acid and any non-natural amino acid; see specification as filed for detailed description of substitutions, R-groups and preferred embodiments
  MOD_RES (15)..(18): Any L- or D-natural or non-natural amino acid, and this range may encompass 1 or 4 residues; see specification as filed for detailed description of substitutions, R-groups and preferred embodiments
  c-term may be amidated

SEQ ID NO: 670 - protein, 31 aa, Artificial Sequence; identical to SEQ ID NO: 291
  Description of Artificial Sequence: Synthetic peptide
  MOD_RES (4)..(4): Any L- or D-natural amino acid and any non-natural amino acid; see specification as filed for detailed description of substitutions, R-groups and preferred embodiments
  MOD_RES (9)..(9): Any L- or D-natural amino acid and any non-natural amino acid; see specification as filed for detailed description of substitutions, R-groups and preferred embodiments
  MOD_RES (11)..(11): Any L- or D-natural amino acid and any non-natural amino acid; see specification as filed for detailed description of substitutions, R-groups and preferred embodiments
  MOD_RES (14)..(14): Any L- or D-natural amino acid and any non-natural amino acid; see specification as filed for detailed description of substitutions, R-groups and preferred embodiments
  MOD_RES (15)..(18): Any L- or D-natural or non-natural amino acid, and this range may encompass 1 or 4 residues; see specification as filed for detailed description of substitutions, R-groups and preferred embodiments
  c-term may be amidated

SEQ ID NO: 671 - protein, 31 aa, Artificial Sequence; identical to SEQ ID NO: 292
  Description of Artificial Sequence: Synthetic peptide
  MOD_RES (5)..(5): Any L- or D-natural amino acid and any non-natural amino acid; see specification as filed for detailed description of substitutions, R-groups and preferred embodiments
  MOD_RES (9)..(9): Any L- or D-natural amino acid and any non-natural amino acid; see specification as filed for detailed description of substitutions, R-groups and preferred embodiments
  MOD_RES (11)..(11): Any L- or D-natural amino acid and any non-natural amino acid; see specification as filed for detailed description of substitutions, R-groups and preferred embodiments
  MOD_RES (14)..(14): Any L- or D-natural amino acid and any non-natural amino acid; see specification as filed for detailed description of substitutions, R-groups and preferred embodiments
  MOD_RES (15)..(18): Any L- or D-natural or non-natural amino acid, and this range may encompass 1 or 4 residues; see specification as filed for detailed description of substitutions, R-groups and preferred embodiments
  c-term may be amidated

SEQ ID NO: 672 - protein, 31 aa, Artificial Sequence; identical to SEQ ID NO: 293
  Description of Artificial Sequence: Synthetic peptide
  MOD_RES (6)..(6): Any L- or D-natural amino acid and any non-natural amino acid; see specification as filed for detailed description of substitutions, R-groups and preferred embodiments
  MOD_RES (9)..(9): Any L- or D-natural amino acid and any non-natural amino acid; see specification as filed for detailed description of substitutions, R-groups and preferred embodiments
  MOD_RES (11)..(11): Any L- or D-natural amino acid and any non-natural amino acid; see specification as filed for detailed description of substitutions, R-groups and preferred embodiments
  MOD_RES (14)..(14): Any L- or D-natural amino acid and any non-natural amino acid; see specification as filed for detailed description of substitutions, R-groups and preferred embodiments
  MOD_RES (15)..(18): Any L- or D-natural or non-natural amino acid, and this range may encompass 1 or 4 residues; see specification as filed for detailed description of substitutions, R-groups and preferred embodiments
  c-term may be amidated

SEQ ID NO: 673 - protein, 31 aa, Artificial Sequence; identical to SEQ ID NO: 294
  Description of Artificial Sequence: Synthetic peptide
  MOD_RES (7)..(7): Any L- or D-natural amino acid and any non-natural amino acid; see specification as filed for detailed description of substitutions, R-groups and preferred embodiments
  MOD_RES (9)..(9): Any L- or D-natural amino acid and any non-natural amino acid; see specification as filed for detailed description of substitutions, R-groups and preferred embodiments
  MOD_RES (11)..(11): Any L- or D-natural amino acid and any non-natural amino acid; see specification as filed for detailed description of substitutions, R-groups and preferred embodiments
  MOD_RES (14)..(14): Any L- or D-natural amino acid and any non-natural amino acid; see specification as filed for detailed description of substitutions, R-groups and preferred embodiments
  MOD_RES (15)..(18): Any L- or D-natural or non-natural amino acid, and this range may encompass 1 or 4 residues; see specification as filed for detailed description of substitutions, R-groups and preferred embodiments
  c-term may be amidated

SEQ ID NO: 674 - protein, 31 aa, Artificial Sequence; identical to SEQ ID NO: 295
  Description of Artificial Sequence: Synthetic peptide
  MOD_RES (8)..(9): Any L- or D-natural amino acid and any non-natural amino acid; see specification as filed for detailed description of substitutions, R-groups and preferred embodiments
  MOD_RES (11)..(11): Any L- or D-natural amino acid and any non-natural amino acid; see specification as filed for detailed description of substitutions, R-groups and preferred embodiments
  MOD_RES (14)..(14): Any L- or D-natural amino acid and any non-natural amino acid; see specification as filed for detailed description of substitutions, R-groups and preferred embodiments
  MOD_RES (15)..(18): Any L- or D-natural or non-natural amino acid, and this range may encompass 1 or 4 residues; see specification as filed for detailed description of substitutions, R-groups and preferred embodiments
  c-term may be amidated

SEQ ID NO: 675 - protein, 34 aa, Artificial Sequence; identical to SEQ ID NO: 404
  Description of Artificial Sequence: Synthetic peptide
  MOD_RES (18)..(21): Any L- or D-natural or non-natural amino acid, and this range may encompass 1 or 4 residues; see specification as filed for detailed description of substitutions, R-groups and preferred embodiments
  c-term may be amidated

SEQ ID NO: 676 - protein, 34 aa, Artificial Sequence; identical to SEQ ID NO: 405
  Description of Artificial Sequence: Synthetic peptide
  MOD_RES (1)..(1): Any L- or D-natural amino acid and any non-natural amino acid; see specification as filed for detailed description of substitutions, R-groups and preferred embodiments
  MOD_RES (9)..(9): Any L- or D-natural amino acid and any non-natural amino acid; see specification as filed for detailed description of substitutions, R-groups and preferred embodiments
  MOD_RES (11)..(11): Any L- or D-natural amino acid and any non-natural amino acid; see specification as filed for detailed description of substitutions, R-groups and preferred embodiments
  MOD_RES (18)..(21): Any L- or D-natural or non-natural amino acid, and this range may encompass 1 or 4 residues; see specification as filed for detailed description of substitutions, R-groups and preferred embodiments
  c-term may be amidated

SEQ ID NO: 677 - protein, 34 aa, Artificial Sequence; identical to SEQ ID NO: 406
  Description of Artificial Sequence: Synthetic peptide
  MOD_RES (2)..(2): Any L- or D-natural amino acid and any non-natural amino acid; see specification as filed for detailed description of substitutions, R-groups and preferred embodiments
  MOD_RES (9)..(9): Any L- or D-natural amino acid and any non-natural amino acid; see specification as filed for detailed description of substitutions, R-groups and preferred embodiments
  MOD_RES (11)..(11): Any L- or D-natural amino acid and any non-natural amino acid; see specification as filed for detailed description of substitutions, R-groups and preferred embodiments
  MOD_RES (18)..(21): Any L- or D-natural or non-natural amino acid, and this range may encompass 1 or 4 residues; see specification as filed for detailed description of substitutions, R-groups and preferred embodiments
  c-term may be amidated

SEQ ID NO: 678 - protein, 34 aa, Artificial Sequence; identical to SEQ ID NO: 407
  Description of Artificial Sequence: Synthetic peptide
  MOD_RES (3)..(3): Any L- or D-natural amino acid and any non-natural amino acid; see specification as filed for detailed description of substitutions, R-groups and preferred embodiments
  MOD_RES (9)..(9): Any L- or D-natural amino acid and any non-natural amino acid; see specification as filed for detailed description of substitutions, R-groups and preferred embodiments
  MOD_RES (11)..(11): Any L- or D-natural amino acid and any non-natural amino acid; see specification as filed for detailed description of substitutions, R-groups and preferred embodiments
  MOD_RES (18)..(21): Any L- or D-natural or non-natural amino acid, and this range may encompass 1 or 4 residues; see specification as filed for detailed description of substitutions, R-groups and preferred embodiments
  c-term may be amidated

SEQ ID NO: 679 - protein, 34 aa, Artificial Sequence; identical to SEQ ID NO: 408
  Description of Artificial Sequence: Synthetic peptide
  MOD_RES (4)..(4): Any L- or D-natural amino acid and any non-natural amino acid; see specification as filed for detailed description of substitutions, R-groups and preferred embodiments
  MOD_RES (9)..(9): Any L- or D-natural amino acid and any non-natural amino acid; see specification as filed for detailed description of substitutions, R-groups and preferred embodiments
  MOD_RES (11)..(11): Any L- or D-natural amino acid and any non-natural amino acid; see specification as filed for detailed description of substitutions, R-groups and preferred embodiments
  MOD_RES (18)..(21): Any L- or D-natural or non-natural amino acid, and this range may encompass 1 or 4 residues; see specification as filed for detailed description of substitutions, R-groups and preferred embodiments
  c-term may be amidated

SEQ ID NO: 680 - protein, 34 aa, Artificial Sequence; identical to SEQ ID NO: 409
  Description of Artificial Sequence: Synthetic peptide
  MOD_RES (5)..(5): Any L- or D-natural amino acid and any non-natural amino acid; see specification as filed for detailed description of substitutions, R-groups and preferred embodiments
  MOD_RES (9)..(9): Any L- or D-natural amino acid and any non-natural amino acid; see specification as filed for detailed description of substitutions, R-groups and preferred embodiments
  MOD_RES (11)..(11): Any L- or D-natural amino acid and any non-natural amino acid; see specification as filed for detailed description of substitutions, R-groups and preferred embodiments
  MOD_RES (18)..(21): Any L- or D-natural or non-natural amino acid, and this range may encompass 1 or 4 residues; see specification as filed for detailed description of substitutions, R-groups and preferred embodiments
  c-term may be amidated

SEQ ID NO: 681 - protein, 34 aa, Artificial Sequence; identical to SEQ ID NO: 410
  Description of Artificial Sequence: Synthetic peptide
  MOD_RES (6)..(6): Any L- or D-natural amino acid and any non-natural amino acid; see specification as filed for detailed description of substitutions, R-groups and preferred embodiments
  MOD_RES (9)..(9): Any L- or D-natural amino acid and any non-natural amino acid; see specification as filed for detailed description of substitutions, R-groups and preferred embodiments
  MOD_RES (11)..(11): Any L- or D-natural amino acid and any non-natural amino acid; see specification as filed for detailed description of substitutions, R-groups and preferred embodiments
  MOD_RES (18)..(21): Any L- or D-natural or non-natural amino acid, and this range may encompass 1 or 4 residues; see specification as filed for detailed description of substitutions, R-groups and preferred embodiments
  c-term may be amidated

SEQ ID NO: 682 - protein, 34 aa, Artificial Sequence; identical to SEQ ID NO: 411
  Description of Artificial Sequence: Synthetic peptide
  MOD_RES (7)..(7): Any L- or D-natural amino acid and any non-natural amino acid; see specification as filed for detailed description of substitutions, R-groups and preferred embodiments
  MOD_RES (9)..(9): Any L- or D-natural amino acid and any non-natural amino acid; see specification as filed for detailed description of substitutions, R-groups and preferred embodiments
  MOD_RES (11)..(11): Any L- or D-natural amino acid and any non-natural amino acid; see specification as filed for detailed description of substitutions, R-groups and preferred embodiments
  MOD_RES (18)..(21): Any L- or D-natural or non-natural amino acid, and this range may encompass 1 or 4 residues; see specification as filed for detailed description of substitutions, R-groups and preferred embodiments
  c-term may be amidated

SEQ ID NO: 683 - protein, 34 aa, Artificial Sequence; identical to SEQ ID NO: 412
  Description of Artificial Sequence: Synthetic peptide
  MOD_RES (8)..(9): Any L- or D-natural amino acid and any non-natural amino acid; see specification as filed for detailed description of substitutions, R-groups and preferred embodiments
  MOD_RES (11)..(11): Any L- or D-natural amino acid and any non-natural amino acid; see specification as filed for detailed description of substitutions, R-groups and preferred embodiments
  MOD_RES (18)..(21): Any L- or D-natural or non-natural amino acid, and this range may encompass 1 or 4 residues; see specification as filed for detailed description of substitutions, R-groups and preferred embodiments
  c-term may be amidated

SEQ ID NO: 684 - protein, 34 aa, Artificial Sequence; identical to SEQ ID NO: 413
  Description of Artificial Sequence: Synthetic peptide
  MOD_RES (12)..(12): Any L- or D-natural amino acid and any non-natural amino acid; see specification as filed for detailed description of substitutions, R-groups and preferred embodiments
  MOD_RES (18)..(21): Any L- or D-natural or non-natural amino acid, and this range may encompass 1 or 4 residues; see specification as filed for detailed description of substitutions, R-groups and preferred embodiments
  c-term may be amidated

SEQ ID NO: 685 - protein, 34 aa, Artificial Sequence; identical to SEQ ID NO: 414
  Description of Artificial Sequence: Synthetic peptide
  MOD_RES (1)..(1): Any L- or D-natural amino acid and any non-natural amino acid; see specification as filed for detailed description of substitutions, R-groups and preferred embodiments
  MOD_RES (9)..(9): Any L- or D-natural amino acid and any non-natural amino acid; see specification as filed for detailed description of substitutions, R-groups and preferred embodiments
  MOD_RES (11)..(12): Any L- or D-natural amino acid and any non-natural amino acid; see specification as filed for detailed description of substitutions, R-groups and preferred embodiments
  MOD_RES (18)..(21): Any L- or D-natural or non-natural amino acid, and this range may encompass 1 or 4 residues; see specification as filed for detailed description of substitutions, R-groups and preferred embodiments
  c-term may be amidated

SEQ ID NO: 686 - protein, 34 aa, Artificial Sequence; identical to SEQ ID NO: 415
  Description of Artificial Sequence: Synthetic peptide
  MOD_RES (2)..(2): Any L- or D-natural amino acid and any non-natural amino acid; see specification as filed for detailed description of substitutions, R-groups and preferred embodiments
  MOD_RES (9)..(9): Any L- or D-natural amino acid and any non-natural amino acid; see specification as filed for detailed description of substitutions, R-groups and preferred embodiments
  MOD_RES (11)..(12): Any L- or D-natural amino acid and any non-natural amino acid; see specification as filed for detailed description of substitutions, R-groups and preferred embodiments
  MOD_RES (18)..(21): Any L- or D-natural or non-natural amino acid, and this range may encompass 1 or 4 residues; see specification as filed for detailed description of substitutions, R-groups and preferred embodiments
  c-term may be amidated

SEQ ID NO: 687 - protein, 34 aa, Artificial Sequence; identical to SEQ ID NO: 416
  Description of Artificial Sequence: Synthetic peptide
  MOD_RES (3)..(3): Any L- or D-natural amino acid and any non-natural amino acid; see specification as filed for detailed description of substitutions, R-groups and preferred embodiments
  MOD_RES (9)..(9): Any L- or D-natural amino acid and any non-natural amino acid; see specification as filed for detailed description of substitutions, R-groups and preferred embodiments
  MOD_RES (11)..(12): Any L- or D-natural amino acid and any non-natural amino acid; see specification as filed for detailed description of substitutions, R-groups and preferred embodiments
  MOD_RES (18)..(21): Any L- or D-natural or non-natural amino acid, and this range may encompass 1 or 4 residues; see specification as filed for detailed description of substitutions, R-groups and preferred embodiments
  c-term may be amidated

SEQ ID NO: 688 - protein, 34 aa, Artificial Sequence; identical to SEQ ID NO: 417
  Description of Artificial Sequence: Synthetic peptide
  MOD_RES (4)..(4): Any L- or D-natural amino acid and any non-natural amino acid; see specification as filed for detailed description of substitutions, R-groups and preferred embodiments
  MOD_RES (9)..(9): Any L- or D-natural amino acid and any non-natural amino acid; see specification as filed for detailed description of substitutions, R-groups and preferred embodiments
  MOD_RES (11)..(12): Any L- or D-natural amino acid and any non-natural amino acid; see specification as filed for detailed description of substitutions, R-groups and preferred embodiments
  MOD_RES (18)..(21): Any L- or D-natural or non-natural amino acid, and this range may encompass 1 or 4 residues; see specification as filed for detailed description of substitutions, R-groups and preferred embodiments
  c-term may be amidated

SEQ ID NO: 689 - protein, 34 aa, Artificial Sequence; identical to SEQ ID NO: 418
  Description of Artificial Sequence: Synthetic peptide
  MOD_RES (5)..(5): Any L- or D-natural amino acid and any non-natural amino acid; see specification as filed for detailed description of substitutions, R-groups and preferred embodiments
  MOD_RES (9)..(9): Any L- or D-natural amino acid and any non-natural amino acid; see specification as filed for detailed description of substitutions, R-groups and preferred embodiments
  MOD_RES (11)..(12): Any L- or D-natural amino acid and any non-natural amino acid; see specification as filed for detailed description of substitutions, R-groups and preferred embodiments
  MOD_RES (18)..(21): Any L- or D-natural or non-natural amino acid, and this range may encompass 1 or 4 residues; see specification as filed for detailed description of substitutions, R-groups and preferred embodiments
  c-term may be amidated

SEQ ID NO: 690 - protein, 34 aa, Artificial Sequence; identical to SEQ ID NO: 419
  Description of Artificial Sequence: Synthetic peptide
  MOD_RES (6)..(6): Any L- or D-natural amino acid and any non-natural amino acid; see specification as filed for detailed description of substitutions, R-groups and preferred embodiments
  MOD_RES (9)..(9): Any L- or D-natural amino acid and any non-natural amino acid; see specification as filed for detailed description of substitutions, R-groups and preferred embodiments
  MOD_RES (11)..(12): Any L- or D-natural amino acid and any non-natural amino acid; see specification as filed for detailed description of substitutions, R-groups and preferred embodiments
  MOD_RES (18)..(21): Any L- or D-natural or non-natural amino acid, and this range may encompass 1 or 4 residues; see specification as filed for detailed description of substitutions, R-groups and preferred embodiments
  c-term may be amidated

SEQ ID NO: 691 - protein, 34 aa, Artificial Sequence; identical to SEQ ID NO: 420
  Description of Artificial Sequence: Synthetic peptide
  MOD_RES (7)..(7): Any L- or D-natural amino acid and any non-natural amino acid; see specification as filed for detailed description of substitutions, R-groups and preferred embodiments
  MOD_RES (9)..(9): Any L- or D-natural amino acid and any non-natural amino acid; see specification as filed for detailed description of substitutions, R-groups and preferred embodiments
  MOD_RES (11)..(12): Any L- or D-natural amino acid and any non-natural amino acid; see specification as filed for detailed description of substitutions, R-groups and preferred embodiments
  MOD_RES (18)..(21): Any L- or D-natural or non-natural amino acid, and this range may encompass 1 or 4 residues; see specification as filed for detailed description of substitutions, R-groups and preferred embodiments
  c-term may be amidated

SEQ ID NO: 692 - protein, 34 aa, Artificial Sequence; identical to SEQ ID NO: 421
  Description of Artificial Sequence: Synthetic peptide
  MOD_RES (8)..(9): Any L- or D-natural amino acid and any non-natural amino acid; see specification as filed for detailed description of substitutions, R-groups and preferred embodiments
  MOD_RES (11)..(12): Any L- or D-natural amino acid and any non-natural amino acid; see specification as filed for detailed description of substitutions, R-groups and preferred embodiments
  MOD_RES (18)..(21): Any L- or D-natural or non-natural amino acid, and this range may encompass 1 or 4 residues; see specification as filed for detailed description of substitutions, R-groups and preferred embodiments
  c-term may be amidated

SEQ ID NO: 693 - protein, 34 aa, Artificial Sequence; identical to SEQ ID NO: 422
  Description of Artificial Sequence: Synthetic peptide
  MOD_RES (13)..(13): Any L- or D-natural amino acid and any non-natural amino acid; see specification as filed for detailed description of substitutions, R-groups and preferred embodiments
  MOD_RES (18)..(21): Any L- or D-natural or non-natural amino acid, and this range may encompass 1 or 4 residues; see specification as filed for detailed description of substitutions, R-groups and preferred embodiments
  c-term may be amidated

SEQ ID NO: 694 - protein, 34 aa, Artificial Sequence; identical to SEQ ID NO: 423
  Description of Artificial Sequence: Synthetic peptide
  MOD_RES (1)..(1): Any L- or D-natural amino acid and any non-natural amino acid; see specification as filed for detailed description of substitutions, R-groups and preferred embodiments
  MOD_RES (9)..(9): Any L- or D-natural amino acid and any non-natural amino acid; see specification as filed for detailed description of substitutions, R-groups and preferred embodiments
  MOD_RES (11)..(11): Any L- or D-natural amino acid and any non-natural amino acid; see specification as filed for detailed description of substitutions, R-groups and preferred embodiments
  MOD_RES (13)..(13): Any L- or D-natural amino acid and any non-natural amino acid; see specification as filed for detailed description of substitutions, R-groups and preferred embodiments
  MOD_RES (18)..(21): Any L- or D-natural or non-natural amino acid, and this range may encompass 1 or 4 residues; see specification as filed for detailed description of substitutions, R-groups and preferred embodiments
  c-term may be amidated

SEQ ID NO: 695 - protein, 34 aa, Artificial Sequence; identical to SEQ ID NO: 424
  Description of Artificial Sequence: Synthetic peptide
  MOD_RES (2)..(2): Any L- or D-natural amino acid and any non-natural amino acid; see specification as filed for detailed description of substitutions, R-groups and preferred embodiments
  MOD_RES (9)..(9): Any L- or D-natural amino acid and any non-natural amino acid; see specification as filed for detailed description of substitutions, R-groups and preferred embodiments
  MOD_RES (11)..(11): Any L- or D-natural amino acid and any non-natural amino acid; see specification as filed for detailed description of substitutions, R-groups and preferred embodiments
  MOD_RES (13)..(13): Any L- or D-natural amino acid and any non-natural amino acid; see specification as filed for detailed description of substitutions, R-groups and preferred embodiments
  MOD_RES (18)..(21): Any L- or D-natural or non-natural amino acid, and this range may encompass 1 or 4 residues; see specification as filed for detailed description of substitutions, R-groups and preferred embodiments
  c-term may be amidated

SEQ ID NO: 696 - protein, 34 aa, Artificial Sequence; identical to SEQ ID NO: 425
  Description of Artificial Sequence: Synthetic peptide
  MOD_RES (3)..(3): Any L- or D-natural amino acid and any non-natural amino acid; see specification as filed for detailed description of substitutions, R-groups and preferred embodiments
  MOD_RES (9)..(9): Any L- or D-natural amino acid and any non-natural amino acid; see specification as filed for detailed description of substitutions, R-groups and preferred embodiments
  MOD_RES (11)..(11): Any L- or D-natural amino acid and any non-natural amino acid; see specification as filed for detailed description of substitutions, R-groups and preferred embodiments
  MOD_RES (13)..(13): Any L- or D-natural amino acid and any non-natural amino acid; see specification as filed for detailed description of substitutions, R-groups and preferred embodiments
  MOD_RES (18)..(21): Any L- or D-natural or non-natural amino acid, and this range may encompass 1 or 4 residues; see specification as filed for detailed description of substitutions, R-groups and preferred embodiments
  c-term may be amidated

SEQ ID NO: 697 - protein, 34 aa, Artificial Sequence; identical to SEQ ID NO: 426
  Description of Artificial Sequence: Synthetic peptide
  MOD_RES (4)..(4): Any L- or D-natural amino acid and any non-natural amino acid; see specification as filed for detailed description of substitutions, R-groups and preferred embodiments
  MOD_RES (9)..(9): Any L- or D-natural amino acid and any non-natural amino acid; see specification as filed for detailed description of substitutions, R-groups and preferred embodiments
  MOD_RES (11)..(11): Any L- or D-natural amino acid and any non-natural amino acid; see specification as filed for detailed description of substitutions, R-groups and preferred embodiments
  MOD_RES (13)..(13): Any L- or D-natural amino acid and any non-natural amino acid; see specification as filed for detailed description of substitutions, R-groups and preferred embodiments
  MOD_RES (18)..(21): Any L- or D-natural or non-natural amino acid, and this range may encompass 1 or 4 residues; see specification as filed for detailed description of substitutions, R-groups and preferred embodiments
  c-term may be amidated

SEQ ID NO: 698 - protein, 34 aa, Artificial Sequence; identical to SEQ ID NO: 427
  Description of Artificial Sequence: Synthetic peptide
  MOD_RES (5)..(5): Any L- or D-natural amino acid and any non-natural amino acid; see specification as filed for detailed description of substitutions, R-groups and preferred embodiments
  MOD_RES (9)..(9): Any L- or D-natural amino acid and any non-natural amino acid; see specification as filed for detailed description of substitutions, R-groups and preferred embodiments
  MOD_RES (11)..(11): Any L- or D-natural amino acid and any non-natural amino acid; see specification as filed for detailed description of substitutions, R-groups and preferred embodiments
  MOD_RES (13)..(13): Any L- or D-natural amino acid and any non-natural amino acid; see specification as filed for detailed description of substitutions, R-groups and preferred embodiments
  MOD_RES (18)..(21): Any L- or D-natural or non-natural amino acid, and this range may encompass 1 or 4 residues; see specification as filed for detailed description of substitutions, R-groups and preferred embodiments
  c-term may be amidated

SEQ ID NO: 699 - protein, 34 aa, Artificial Sequence; identical to SEQ ID NO: 428
  Description of Artificial Sequence: Synthetic peptide
  MOD_RES (6)..(6): Any L- or D-natural amino acid and any non-natural amino acid; see specification as filed for detailed description of substitutions, R-groups and preferred embodiments
  MOD_RES (9)..(9): Any L- or D-natural amino acid and any non-natural amino acid; see specification as filed for detailed description of substitutions, R-groups and preferred embodiments
  MOD_RES (11)..(11): Any L- or D-natural amino acid and any non-natural amino acid; see specification as filed for detailed description of substitutions, R-groups and preferred embodiments
  MOD_RES (13)..(13): Any L- or D-natural amino acid and any non-natural amino acid; see specification as filed for detailed description of substitutions, R-groups and preferred embodiments
  MOD_RES (18)..(21): Any L- or D-natural or non-natural amino acid, and this range may encompass 1 or 4 residues; see specification as filed for detailed description of substitutions, R-groups and preferred embodiments
  c-term may be amidated

SEQ ID NO: 700 - protein, 34 aa, Artificial Sequence; identical to SEQ ID NO: 429
  Description of Artificial Sequence: Synthetic peptide
  MOD_RES (7)..(7): Any L- or D-natural amino acid and any non-natural amino acid; see specification as filed for detailed description of substitutions, R-groups and preferred embodiments
  MOD_RES (9)..(9): Any L- or D-natural amino acid and any non-natural amino acid; see specification as filed for detailed description of substitutions, R-groups and preferred embodiments
  MOD_RES (11)..(11): Any L- or D-natural amino acid and any non-natural amino acid; see specification as filed for detailed description of substitutions, R-groups and preferred embodiments
  MOD_RES (13)..(13): Any L- or D-natural amino acid and any non-natural amino acid; see specification as filed for detailed description of substitutions, R-groups and preferred embodiments
  MOD_RES (18)..(21): Any L- or D-natural or non-natural amino acid, and this range may encompass 1 or 4 residues; see specification as filed for detailed description of substitutions, R-groups and preferred embodiments
  c-term may be amidated

SEQ ID NO: 701 - protein, 34 aa, Artificial Sequence; identical to SEQ ID NO: 430
  Description of Artificial Sequence: Synthetic peptide
  MOD_RES (8)..(9): Any L- or D-natural amino acid and any non-natural amino acid; see specification as filed for detailed description of substitutions, R-groups and preferred embodiments
  MOD_RES (11)..(11): Any L- or D-natural amino acid and any non-natural amino acid; see specification as filed for detailed description of substitutions, R-groups and preferred embodiments
  MOD_RES (13)..(13): Any L- or D-natural amino acid and any non-natural amino acid; see specification as filed for detailed description of substitutions, R-groups and preferred embodiments
  MOD_RES (18)..(21): Any L- or D-natural or non-natural amino acid, and this range may encompass 1 or 4 residues; see specification as filed for detailed description of substitutions, R-groups and preferred embodiments
  c-term may be amidated

SEQ ID NO: 702 - protein, 34 aa, Artificial Sequence; identical to SEQ ID NO: 431
  Description of Artificial Sequence: Synthetic peptide
  MOD_RES (14)..(14): Any L- or D-natural amino acid and any non-natural amino acid; see specification as filed for detailed description of substitutions, R-groups and preferred embodiments
  MOD_RES (18)..(21): Any L- or D-natural or non-natural amino acid, and this range may encompass 1 or 4 residues; see specification as filed for detailed description of substitutions, R-groups and preferred embodiments
  c-term may be amidated

SEQ ID NO: 703 - protein, 34 aa, Artificial Sequence; identical to SEQ ID NO: 432
  Description of Artificial Sequence: Synthetic peptide
  MOD_RES (1)..(1): Any L- or D-natural amino acid and any non-natural amino acid; see specification as filed for detailed description of substitutions, R-groups and preferred embodiments
  MOD_RES (9)..(9): Any L- or D-natural amino acid and any non-natural amino acid; see specification as filed for detailed description of substitutions, R-groups and preferred embodiments
  MOD_RES (11)..(11): Any L- or D-natural amino acid and any non-natural amino acid; see specification as filed for detailed description of substitutions, R-groups and preferred embodiments
  MOD_RES (14)..(14): Any L- or D-natural amino acid and any non-natural amino acid; see specification as filed for detailed description of substitutions, R-groups and preferred embodiments
  MOD_RES (18)..(21): Any L- or D-natural or non-natural amino acid, and this range may encompass 1 or 4 residues; see specification as filed for detailed description of substitutions, R-groups and preferred embodiments
  c-term may be amidated

SEQ ID NO: 704 - protein, 34 aa, Artificial Sequence; identical to SEQ ID NO: 433
  Description of Artificial Sequence: Synthetic peptide
  MOD_RES (2)..(2): Any L- or D-natural amino acid and any non-natural amino acid; see specification as filed for detailed description of substitutions, R-groups and preferred embodiments
  MOD_RES (9)..(9): Any L- or D-natural amino acid and any non-natural amino acid; see specification as filed for detailed description of substitutions, R-groups and preferred embodiments
  MOD_RES (11)..(11): Any L- or D-natural amino acid and any non-natural amino acid; see specification as filed for detailed description of substitutions, R-groups and preferred embodiments
  MOD_RES (14)..(14): Any L- or D-natural amino acid and any non-natural amino acid; see specification as filed for detailed description of substitutions, R-groups and preferred embodiments
  MOD_RES (18)..(21): Any L- or D-natural or non-natural amino acid, and this range may encompass 1 or 4 residues; see specification as filed for detailed description of substitutions, R-groups and preferred embodiments
  c-term may be amidated

SEQ ID NO: 705 - protein, 34 aa, Artificial Sequence; identical to SEQ ID NO: 434
  Description of Artificial Sequence: Synthetic peptide
  MOD_RES (3)..(3): Any L- or D-natural amino acid and any non-natural amino acid; see specification as filed for detailed description of substitutions, R-groups and preferred embodiments
  MOD_RES (9)..(9): Any L- or D-natural amino acid and any non-natural amino acid; see specification as filed for detailed description of substitutions, R-groups and preferred embodiments
  MOD_RES (11)..(11): Any L- or D-natural amino acid and any non-natural amino acid; see specification as filed for detailed description of substitutions, R-groups and preferred embodiments
  MOD_RES (14)..(14): Any L- or D-natural amino acid and any non-natural amino acid; see specification as filed for detailed description of substitutions, R-groups and preferred embodiments
  MOD_RES (18)..(21): Any L- or D-natural or non-natural amino acid, and this range may encompass 1 or 4 residues; see specification as filed for detailed description of substitutions, R-groups and preferred embodiments
  c-term may be amidated

SEQ ID NO: 706 - protein, 34 aa, Artificial Sequence; identical to SEQ ID NO: 435
  Description of Artificial Sequence: Synthetic peptide
  MOD_RES (4)..(4): Any L- or D-natural amino acid and any non-natural amino acid; see specification as filed for detailed description of substitutions, R-groups and preferred embodiments
  MOD_RES (9)..(9): Any L- or D-natural amino acid and any non-natural amino acid; see specification as filed for detailed description of substitutions, R-groups and preferred embodiments
  MOD_RES (11)..(11): Any L- or D-natural amino acid and any non-natural amino acid; see specification as filed for detailed description of substitutions, R-groups and preferred embodiments
  MOD_RES (14)..(14): Any L- or D-natural amino acid and any non-natural amino acid; see specification as filed for detailed description of substitutions, R-groups and preferred embodiments
  MOD_RES (18)..(21): Any L- or D-natural or non-natural amino acid, and this range may encompass 1 or 4 residues; see specification as filed for detailed description of substitutions, R-groups and preferred embodiments
  c-term may be amidated

SEQ ID NO: 707 - protein, 34 aa, Artificial Sequence; identical to SEQ ID NO: 436
  Description of Artificial Sequence: Synthetic peptide
  MOD_RES (5)..(5): Any L- or D-natural amino acid and any non-natural amino acid; see specification as filed for detailed description of substitutions, R-groups and preferred embodiments
  MOD_RES (9)..(9): Any L- or D-natural amino acid and any non-natural amino acid; see specification as filed for detailed description of substitutions, R-groups and preferred embodiments
  MOD_RES (11)..(11): Any L- or D-natural amino acid and any non-natural amino acid; see specification as filed for detailed description of substitutions, R-groups and preferred embodiments
  MOD_RES (14)..(14): Any L- or D-natural amino acid and any non-natural amino acid; see specification as filed for detailed description of substitutions, R-groups and preferred embodiments
  MOD_RES (18)..(21): Any L- or D-natural or non-natural amino acid, and this range may encompass 1 or 4 residues; see specification as filed for detailed description of substitutions, R-groups and preferred embodiments
  c-term may be amidated

SEQ ID NO: 708 - protein, 34 aa, Artificial Sequence; identical to SEQ ID NO: 437
  Description of Artificial Sequence: Synthetic peptide
  MOD_RES (6)..(6): Any L- or D-natural amino acid and any non-natural amino acid; see specification as filed for detailed description of substitutions, R-groups and preferred embodiments
  MOD_RES (9)..(9): Any L- or D-natural amino acid and any non-natural amino acid; see specification as filed for detailed description of substitutions, R-groups and preferred embodiments
  MOD_RES (11)..(11): Any L- or D-natural amino acid and any non-natural amino acid; see specification as filed for detailed description of substitutions, R-groups and preferred embodiments
  MOD_RES (14)..(14): Any L- or D-natural amino acid and any non-natural amino acid; see specification as filed for detailed description of substitutions, R-groups and preferred embodiments
  MOD_RES (18)..(21): Any L- or D-natural or non-natural amino acid, and this range may encompass 1 or 4 residues; see specification as filed for detailed description of substitutions, R-groups and preferred embodiments
  c-term may be amidated

SEQ ID NO: 709 - protein, 34 aa, Artificial Sequence; identical to SEQ ID NO: 438
  Description of Artificial Sequence: Synthetic peptide
  MOD_RES (7)..(7): Any L- or D-natural amino acid and any non-natural amino acid; see specification as filed for detailed description of substitutions, R-groups and preferred embodiments
  MOD_RES (9)..(9): Any L- or D-natural amino acid and any non-natural amino acid; see specification as filed for detailed description of substitutions, R-groups and preferred embodiments
  MOD_RES (11)..(11): Any L- or D-natural amino acid and any non-natural amino acid; see specification as filed for detailed description of substitutions, R-groups and preferred embodiments
  MOD_RES (14)..(14): Any L- or D-natural amino acid and any non-natural amino acid; see specification as filed for detailed description of substitutions, R-groups and preferred embodiments
  MOD_RES (18)..(21): Any L- or D-natural or non-natural amino acid, and this range may encompass 1 or 4 residues; see specification as filed for detailed description of substitutions, R-groups and preferred embodiments
  c-term may be amidated

SEQ ID NO: 710 - protein, 34 aa, Artificial Sequence; identical to SEQ ID NO: 439
  Description of Artificial Sequence: Synthetic peptide
  MOD_RES (8)..(9): Any L- or D-natural amino acid and any non-natural amino acid; see specification as filed for detailed description of substitutions, R-groups and preferred embodiments
  MOD_RES (11)..(11): Any L- or D-natural amino acid and any non-natural amino acid; see specification as filed for detailed description of substitutions, R-groups and preferred embodiments
  MOD_RES (14)..(14): Any L- or D-natural amino acid and any non-natural amino acid; see specification as filed for detailed description of substitutions, R-groups and preferred embodiments
  MOD_RES (18)..(21): Any L- or D-natural or non-natural amino acid, and this range may encompass 1 or 4 residues; see specification as filed for detailed description of substitutions, R-groups and preferred embodiments
  c-term may be amidated

SEQ ID NO: 711 - protein, 34 aa, Artificial Sequence; identical to SEQ ID NO: 440
  Description of Artificial Sequence: Synthetic peptide
  MOD_RES (16)..(16): Any L- or D-natural amino acid and any non-natural amino acid; see specification as filed for detailed description of substitutions, R-groups and preferred embodiments
  MOD_RES (18)..(21): Any L- or D-natural or non-natural amino acid, and this range may encompass 1 or 4 residues; see specification as filed for detailed description of substitutions, R-groups and preferred embodiments
  c-term may be amidated

SEQ ID NO: 712 - protein, 34 aa, Artificial Sequence; identical to SEQ ID NO: 441
  Description of Artificial Sequence: Synthetic peptide
  MOD_RES (1)..(1): Any L- or D-natural amino acid and any non-natural amino acid; see specification as filed for detailed description of substitutions, R-groups and preferred embodiments
  MOD_RES (9)..(9): Any L- or D-natural amino acid and any non-natural amino acid; see specification as filed for detailed description of substitutions, R-groups and preferred embodiments
  MOD_RES (11)..(11): Any L- or D-natural amino acid and any non-natural amino acid; see specification as filed for detailed description of substitutions, R-groups and preferred embodiments
  MOD_RES (16)..(16): Any L- or D-natural amino acid and any non-natural amino acid; see specification as filed for detailed description of substitutions, R-groups and preferred embodiments
  MOD_RES (18)..(21): Any L- or D-natural or non-natural amino acid, and this range may encompass 1 or 4 residues; see specification as filed for detailed description of substitutions, R-groups and preferred embodiments
  c-term may be amidated

SEQ ID NO: 713 - protein, 34 aa, Artificial Sequence; identical to SEQ ID NO: 442
  Description of Artificial Sequence: Synthetic peptide
  MOD_RES (2)..(2): Any L- or D-natural amino acid and any non-natural amino acid; see specification as filed for detailed description of substitutions, R-groups and preferred embodiments
  MOD_RES (9)..(9): Any L- or D-natural amino acid and any non-natural amino acid; see specification as filed for detailed description of substitutions, R-groups and preferred embodiments
  MOD_RES (11)..(11): Any L- or D-natural amino acid and any non-natural amino acid; see specification as filed for detailed description of substitutions, R-groups and preferred embodiments
  MOD_RES (16)..(16): Any L- or D-natural amino acid and any non-natural amino acid; see specification as filed for detailed description of substitutions, R-groups and preferred embodiments
  MOD_RES (18)..(21): Any L- or D-natural or non-natural amino acid, and this range may encompass 1 or 4 residues; see specification as filed for detailed description of substitutions, R-groups and preferred embodiments
  c-term may be amidated

SEQ ID NO: 714 - protein, 34 aa, Artificial Sequence; identical to SEQ ID NO: 443
  Description of Artificial Sequence: Synthetic peptide
  MOD_RES (3)..(3): Any L- or D-natural amino acid and any non-natural amino acid; see specification as filed for detailed description of substitutions, R-groups and preferred embodiments
  MOD_RES (9)..(9): Any L- or D-natural amino acid and any non-natural amino acid; see specification as filed for detailed description of substitutions, R-groups and preferred embodiments
  MOD_RES (11)..(11): Any L- or D-natural amino acid and any non-natural amino acid; see specification as filed for detailed description of substitutions, R-groups and preferred embodiments
  MOD_RES (16)..(16): Any L- or D-natural amino acid and any non-natural amino acid; see specification as filed for detailed description of substitutions, R-groups and preferred embodiments
  MOD_RES (18)..(21): Any L- or D-natural or non-natural amino acid, and this range may encompass 1 or 4 residues; see specification as filed for detailed description of substitutions, R-groups and preferred embodiments
  c-term may be amidated

SEQ ID NO: 715 - protein, 34 aa, Artificial Sequence; identical to SEQ ID NO: 444
  Description of Artificial Sequence: Synthetic peptide
  MOD_RES (4)..(4): Any L- or D-natural amino acid and any non-natural amino acid; see specification as filed for detailed description of substitutions, R-groups and preferred embodiments
  MOD_RES (9)..(9): Any L- or D-natural amino acid and any non-natural amino acid; see specification as filed for detailed description of substitutions, R-groups and preferred embodiments
  MOD_RES (11)..(11): Any L- or D-natural amino acid and any non-natural amino acid; see specification as filed for detailed description of substitutions, R-groups and preferred embodiments
  MOD_RES (16)..(16): Any L- or D-natural amino acid and any non-natural amino acid; see specification as filed for detailed description of substitutions, R-groups and preferred embodiments
  MOD_RES (18)..(21): Any L- or D-natural or non-natural amino acid, and this range may encompass 1 or 4 residues; see specification as filed for detailed description of substitutions, R-groups and preferred embodiments
  c-term may be amidated

SEQ ID NO: 716 - protein, 34 aa, Artificial Sequence; identical to SEQ ID NO: 445
  Description of Artificial Sequence: Synthetic peptide
  MOD_RES (5)..(5): Any L- or D-natural amino acid and any non-natural amino acid; see specification as filed for detailed description of substitutions, R-groups and preferred embodiments
  MOD_RES (9)..(9): Any L- or D-natural amino acid and any non-natural amino acid; see specification as filed for detailed description of substitutions, R-groups and preferred embodiments
  MOD_RES (11)..(11): Any L- or D-natural amino acid and any non-natural amino acid; see specification as filed for detailed description of substitutions, R-groups and preferred embodiments
  MOD_RES (16)..(16): Any L- or D-natural amino acid and any non-natural amino acid; see specification as filed for detailed description of substitutions, R-groups and preferred embodiments
  MOD_RES (18)..(21): Any L- or D-natural or non-natural amino acid, and this range may encompass 1 or 4 residues; see specification as filed for detailed description of substitutions, R-groups and preferred embodiments
  c-term may be amidated

SEQ ID NO: 717 - protein, 34 aa, Artificial Sequence; identical to SEQ ID NO: 446
  Description of Artificial Sequence: Synthetic peptide
  MOD_RES (6)..(6): Any L- or D-natural amino acid and any non-natural amino acid; see specification as filed for detailed description of substitutions, R-groups and preferred embodiments
  MOD_RES (9)..(9): Any L- or D-natural amino acid and any non-natural amino acid; see specification as filed for detailed description of substitutions, R-groups and preferred embodiments
  MOD_RES (11)..(11): Any L- or D-natural amino acid and any non-natural amino acid; see specification as filed for detailed description of substitutions, R-groups and preferred embodiments
  MOD_RES (16)..(16): Any L- or D-natural amino acid and any non-natural amino acid; see specification as filed for detailed description of substitutions, R-groups and preferred embodiments
  MOD_RES (18)..(21): Any L- or D-natural or non-natural amino acid, and this range may encompass 1 or 4 residues; see specification as filed for detailed description of substitutions, R-groups and preferred embodiments
  c-term may be amidated

SEQ ID NO: 718 - protein, 34 aa, Artificial Sequence; identical to SEQ ID NO: 447
  Description of Artificial Sequence: Synthetic peptide
  MOD_RES (7)..(7): Any L- or D-natural amino acid and any non-natural amino acid; see specification as filed for detailed description of substitutions, R-groups and preferred embodiments
  MOD_RES (9)..(9): Any L- or D-natural amino acid and any non-natural amino acid; see specification as filed for detailed description of substitutions, R-groups and preferred embodiments
  MOD_RES (11)..(11): Any L- or D-natural amino acid and any non-natural amino acid; see specification as filed for detailed description of substitutions, R-groups and preferred embodiments
  MOD_RES (16)..(16): Any L- or D-natural amino acid and any non-natural amino acid; see specification as filed for detailed description of substitutions, R-groups and preferred embodiments
  MOD_RES (18)..(21): Any L- or D-natural or non-natural amino acid, and this range may encompass 1 or 4 residues; see specification as filed for detailed description of substitutions, R-groups and preferred embodiments
  c-term may be amidated

SEQ ID NO: 719 - protein, 34 aa, Artificial Sequence; identical to SEQ ID NO: 448
  Description of Artificial Sequence: Synthetic peptide
  MOD_RES (8)..(9): Any L- or D-natural amino acid and any non-natural amino acid; see specification as filed for detailed description of substitutions, R-groups and preferred embodiments
  MOD_RES (11)..(11): Any L- or D-natural amino acid and any non-natural amino acid; see specification as filed for detailed description of substitutions, R-groups and preferred embodiments
  MOD_RES (16)..(16): Any L- or D-natural amino acid and any non-natural amino acid; see specification as filed for detailed description of substitutions, R-groups and preferred embodiments
  MOD_RES (18)..(21): Any L- or D-natural or non-natural amino acid, and this range may encompass 1 or 4 residues; see specification as filed for detailed description of substitutions, R-groups and preferred embodiments
  c-term may be amidated

SEQ ID NO: 720 - protein, 34 aa, Artificial Sequence; identical to SEQ ID NO: 449
  Description of Artificial Sequence: Synthetic peptide
  MOD_RES (17)..(17): Any L- or D-natural amino acid and any non-natural amino acid; see specification as filed for detailed description of substitutions, R-groups and preferred embodiments
  MOD_RES (18)..(21): Any L- or D-natural or non-natural amino acid, and this range may encompass 1 or 4 residues; see specification as filed for detailed description of substitutions, R-groups and preferred embodiments
  c-term may be amidated

SEQ ID NO: 721 - protein, 34 aa, Artificial Sequence; identical to SEQ ID NO: 450
  Description of Artificial Sequence: Synthetic peptide
  MOD_RES (1)..(1): Any L- or D-natural amino acid and any non-natural amino acid; see specification as filed for detailed description of substitutions, R-groups and preferred embodiments
  MOD_RES (9)..(9): Any L- or D-natural amino acid and any non-natural amino acid; see specification as filed for detailed description of substitutions, R-groups and preferred embodiments
  MOD_RES (11)..(11): Any L- or D-natural amino acid and any non-natural amino acid; see specification as filed for detailed description of substitutions, R-groups and preferred embodiments
  MOD_RES (17)..(17): Any L- or D-natural amino acid and any non-natural amino acid; see specification as filed for detailed description of substitutions, R-groups and preferred embodiments
  MOD_RES (18)..(21): Any L- or D-natural or non-natural amino acid, and this range may encompass 1 or 4 residues; see specification as filed for detailed description of substitutions, R-groups and preferred embodiments
  c-term may be amidated

SEQ ID NO: 722 - protein, 34 aa, Artificial Sequence; identical to SEQ ID NO: 451
  Description of Artificial Sequence: Synthetic peptide
  MOD_RES (2)..(2): Any L- or D-natural amino acid and any non-natural amino acid; see specification as filed for detailed description of substitutions, R-groups and preferred embodiments
  MOD_RES (9)..(9): Any L- or D-natural amino acid and any non-natural amino acid; see specification as filed for detailed description of substitutions, R-groups and preferred embodiments
  MOD_RES (11)..(11): Any L- or D-natural amino acid and any non-natural amino acid; see specification as filed for detailed description of substitutions, R-groups and preferred embodiments
  MOD_RES (17)..(17): Any L- or D-natural amino acid and any non-natural amino acid; see specification as filed for detailed description of substitutions, R-groups and preferred embodiments
  MOD_RES (18)..(21): Any L- or D-natural or non-natural amino acid, and this range may encompass 1 or 4 residues; see specification as filed for detailed description of substitutions, R-groups and preferred embodiments
  c-term may be amidated

SEQ ID NO: 723 - protein, 34 aa, Artificial Sequence; identical to SEQ ID NO: 452
  Description of Artificial Sequence: Synthetic peptide
  MOD_RES (3)..(3): Any L- or D-natural amino acid and any non-natural amino acid; see specification as filed for detailed description of substitutions, R-groups and preferred embodiments
  MOD_RES (9)..(9): Any L- or D-natural amino acid and any non-natural amino acid; see specification as filed for detailed description of substitutions, R-groups and preferred embodiments
  MOD_RES (11)..(11): Any L- or D-natural amino acid and any non-natural amino acid; see specification as filed for detailed description of substitutions, R-groups and preferred embodiments
  MOD_RES (17)..(17): Any L- or D-natural amino acid and any non-natural amino acid; see specification as filed for detailed description of substitutions, R-groups and preferred embodiments
  MOD_RES (18)..(21): Any L- or D-natural or non-natural amino acid, and this range may encompass 1 or 4 residues; see specification as filed for detailed description of substitutions, R-groups and preferred embodiments
  c-term may be amidated

SEQ ID NO: 724 - protein, 34 aa, Artificial Sequence; identical to SEQ ID NO: 453
  Description of Artificial Sequence: Synthetic peptide
  MOD_RES (4)..(4): Any L- or D-natural amino acid and any non-natural amino acid; see specification as filed for detailed description of substitutions, R-groups and preferred embodiments
  MOD_RES (9)..(9): Any L- or D-natural amino acid and any non-natural amino acid; see specification as filed for detailed description of substitutions, R-groups and preferred embodiments
  MOD_RES (11)..(11): Any L- or D-natural amino acid and any non-natural amino acid; see specification as filed for detailed description of substitutions, R-groups and preferred embodiments
  MOD_RES (17)..(17): Any L- or D-natural amino acid and any non-natural amino acid; see specification as filed for detailed description of substitutions, R-groups and preferred embodiments
  MOD_RES (18)..(21): Any L- or D-natural or non-natural amino acid, and this range may encompass 1 or 4 residues; see specification as filed for detailed description of substitutions, R-groups and preferred embodiments
  c-term may be amidated

SEQ ID NO: 725 - protein, 34 aa, Artificial Sequence; identical to SEQ ID NO: 454
  Description of Artificial Sequence: Synthetic peptide
  MOD_RES (5)..(5): Any L- or D-natural amino acid and any non-natural amino acid; see specification as filed for detailed description of substitutions, R-groups and preferred embodiments
  MOD_RES (9)..(9): Any L- or D-natural amino acid and any non-natural amino acid; see specification as filed for detailed description of substitutions, R-groups and preferred embodiments
  MOD_RES (11)..(11): Any L- or D-natural amino acid and any non-natural amino acid; see specification as filed for detailed description of substitutions, R-groups and preferred embodiments
  MOD_RES (17)..(17): Any L- or D-natural amino acid and any non-natural amino acid; see specification as filed for detailed description of substitutions, R-groups and preferred embodiments
  MOD_RES (18)..(21): Any L- or D-natural or non-natural amino acid, and this range may encompass 1 or 4 residues; see specification as filed for detailed description of substitutions, R-groups and preferred embodiments
  c-term may be amidated

SEQ ID NO: 726 - protein, 34 aa, Artificial Sequence; identical to SEQ ID NO: 455
  Description of Artificial Sequence: Synthetic peptide
  MOD_RES (6)..(6): Any L- or D-natural amino acid and any non-natural amino acid; see specification as filed for detailed description of substitutions, R-groups and preferred embodiments
  MOD_RES (9)..(9): Any L- or D-natural amino acid and any non-natural amino acid; see specification as filed for detailed description of substitutions, R-groups and preferred embodiments
  MOD_RES (11)..(11): Any L- or D-natural amino acid and any non-natural amino acid; see specification as filed for detailed description of substitutions, R-groups and preferred embodiments
  MOD_RES (17)..(17): Any L- or D-natural amino acid and any non-natural amino acid; see specification as filed for detailed description of substitutions, R-groups and preferred embodiments
  MOD_RES (18)..(21): Any L- or D-natural or non-natural amino acid, and this range may encompass 1 or 4 residues; see specification as filed for detailed description of substitutions, R-groups and preferred embodiments
  c-term may be amidated

SEQ ID NO: 727 - protein, 34 aa, Artificial Sequence; identical to SEQ ID NO: 456
  Description of Artificial Sequence: Synthetic peptide
  MOD_RES (7)..(7): Any L- or D-natural amino acid and any non-natural amino acid; see specification as filed for detailed description of substitutions, R-groups and preferred embodiments
  MOD_RES (9)..(9): Any L- or D-natural amino acid and any non-natural amino acid; see specification as filed for detailed description of substitutions, R-groups and preferred embodiments
  MOD_RES (11)..(11): Any L- or D-natural amino acid and any non-natural amino acid; see specification as filed for detailed description of substitutions, R-groups and preferred embodiments
  MOD_RES (17)..(17): Any L- or D-natural amino acid and any non-natural amino acid; see specification as filed for detailed description of substitutions, R-groups and preferred embodiments
  MOD_RES (18)..(21): Any L- or D-natural or non-natural amino acid, and this range may encompass 1 or 4 residues; see specification as filed for detailed description of substitutions, R-groups and preferred embodiments
  c-term may be amidated

SEQ ID NO: 728 - protein, 34 aa, Artificial Sequence; identical to SEQ ID NO: 457
  Description of Artificial Sequence: Synthetic peptide
  MOD_RES (8)..(9): Any L- or D-natural amino acid and any non-natural amino acid; see specification as filed for detailed description of substitutions, R-groups and preferred embodiments
  MOD_RES (11)..(11): Any L- or D-natural amino acid and any non-natural amino acid; see specification as filed for detailed description of substitutions, R-groups and preferred embodiments
  MOD_RES (17)..(17): Any L- or D-natural amino acid and any non-natural amino acid; see specification as filed for detailed description of substitutions, R-groups and preferred embodiments
  MOD_RES (18)..(21): Any L- or D-natural or non-natural amino acid, and this range may encompass 1 or 4 residues; see specification as filed for detailed description of substitutions, R-groups and preferred embodiments
  c-term may be amidated

SEQ ID NO: 729 - protein, 9 aa, Artificial Sequence
  Description of Artificial Sequence: Synthetic peptide
  c-term may be amidated
SLAADTPTA

SEQ ID NO: 730 - protein, 21 aa, Artificial Sequence
  Description of Artificial Sequence: Synthetic peptide
  c-term may be amidated
AFSYTSRQIPQNADYFETSSQ

SEQ ID NO: 731 - protein, 15 aa, Artificial Sequence [sequence omitted]

SEQ ID NO: 732 - protein, 30 aa, Artificial Sequence
  Description of Artificial Sequence: Synthetic peptide
  c-term may be amidated
SLAADTPTCCFSYTSRQIPQNADYFETSSQ

SEQ ID NO: 733 - protein, 30 aa, Artificial Sequence
  Description of Artificial Sequence: Synthetic peptide
  MOD_RES (1)..(1): Any L- or D-natural amino acid and any non-natural amino acid; see specification as filed for detailed description of substitutions, R-groups and preferred embodiments
  MOD_RES (9)..(10): Any L- or D-natural amino acid and any non-natural amino acid; see specification as filed for detailed description of substitutions, R-groups and preferred embodiments
  c-term may be amidated
XLAADTPTXXFSYTSRQIPQNADYFETSSQ

SEQ ID NO: 734 - protein, 30 aa, Artificial Sequence
  Description of Artificial Sequence: Synthetic peptide
  MOD_RES (2)..(2): Any L- or D-natural amino acid and any non-natural amino acid; see specification as filed for detailed description of substitutions, R-groups and preferred embodiments
  MOD_RES (9)..(10): Any L- or D-natural amino acid and any non-natural amino acid; see specification as filed for detailed description of substitutions, R-groups and preferred embodiments
  c-term may be amidated
SXAADTPTXXFSYTSRQIPQNADYFETSSQ

SEQ ID NO: 735 - protein, 30 aa, Artificial Sequence
  Description of Artificial Sequence: Synthetic peptide
  MOD_RES (3)..(3): Any L- or D-natural amino acid and any non-natural amino acid; see specification as filed for detailed description of substitutions, R-groups and preferred embodiments
  MOD_RES (9)..(10): Any L- or D-natural amino acid and any non-natural amino acid; see specification as filed for detailed description of substitutions, R-groups and preferred embodiments
  c-term may be amidated
SLXADTPTXXFSYTSRQIPQNADYFETSSQ

SEQ ID NO: 736 - protein, 30 aa, Artificial Sequence
  Description of Artificial Sequence: Synthetic peptide
  MOD_RES (4)..(4): Any L- or D-natural amino acid and any non-natural amino acid; see specification as filed for detailed description of substitutions, R-groups and preferred embodiments
  MOD_RES (9)..(10): Any L- or D-natural amino acid and any non-natural amino acid; see specification as filed for detailed description of substitutions, R-groups and preferred embodiments
  c-term may be amidated
SLAXDTPTXXFSYTSRQIPQNADYFETSSQ

SEQ ID NO: 737 - protein, 30 aa, Artificial Sequence
  Description of Artificial Sequence: Synthetic peptide
  MOD_RES (5)..(5): Any L- or D-natural amino acid and any non-natural amino acid; see specification as filed for detailed description of substitutions, R-groups and preferred embodiments
  MOD_RES (9)..(10): Any L- or D-natural amino acid and any non-natural amino acid; see specification as filed for detailed description of substitutions, R-groups and preferred embodiments
  c-term may be amidated
SLAAXTPTXXFSYTSRQIPQNADYFETSSQ

SEQ ID NO: 738 - protein, 30 aa, Artificial Sequence
  Description of Artificial Sequence: Synthetic peptide
  MOD_RES (6)..(6): Any L- or D-natural amino acid and any non-natural amino acid; see specification as filed for detailed description of substitutions, R-groups and preferred embodiments
  MOD_RES (9)..(10): Any L- or D-natural amino acid and any non-natural amino acid; see specification as filed for detailed description of substitutions, R-groups and preferred embodiments
  c-term may be amidated
SLAADXPTXXFSYTSRQIPQNADYFETSSQ

SEQ ID NO: 739 - protein, 30 aa, Artificial Sequence
  Description of Artificial Sequence: Synthetic peptide
  MOD_RES (7)..(7): Any L- or D-natural amino acid and any non-natural amino acid; see specification as filed for detailed description of substitutions, R-groups and preferred embodiments
  MOD_RES (9)..(10): Any L- or D-natural amino acid and any non-natural amino acid; see specification as filed for detailed description of substitutions, R-groups and preferred embodiments
  c-term may be amidated
SLAADTXTXXFSYTSRQIPQNADYFETSSQ

SEQ ID NO: 740 - protein, 30 aa, Artificial Sequence
  Description of Artificial Sequence: Synthetic peptide
  MOD_RES (8)..(10): Any L- or D-natural amino acid and any non-natural amino acid; see specification as filed for detailed description of substitutions, R-groups and preferred embodiments
  c-term may be amidated
SLAADTPXXXFSYTSRQIPQNADYFETSSQ

SEQ ID NO: 741 - protein, 18 aa, Artificial Sequence
  Description of Artificial Sequence: Synthetic peptide
  c-term may be amidated
ADPSEEWVQYVDDLELSA

SEQ ID NO: 742 - protein, 32 aa, Artificial Sequence
  Description of Artificial Sequence: Synthetic peptide
  MOD_RES (15)..(18): Any L- or D-natural or non-natural amino acid, and this range may encompass 1 or 4 residues; see specification as filed for detailed description of substitutions, R-groups and preferred embodiments
  c-term may be amidated
SLAADTPTCCFSYTXXXXEEWVQYVDDLELSA

SEQ ID NO: 743 - protein, 32 aa, Artificial Sequence
  Description of Artificial Sequence: Synthetic peptide
  MOD_RES (9)..(10): Any L- or D-natural amino acid and any non-natural amino acid; see specification as filed for detailed description of substitutions, R-groups and preferred embodiments
  MOD_RES (15)..(18): Any L- or D-natural or non-natural amino acid, and this range may encompass 1 or 4 residues; see specification as filed for detailed description of substitutions, R-groups and preferred embodiments
  c-term may be amidated
SLAADTPTXXFSYTXXXXEEWVQYVDDLELSA

SEQ ID NO: 744 - protein, 32 aa, Artificial Sequence
  Description of Artificial Sequence: Synthetic peptide
  MOD_RES (1)..(1): Any L- or D-natural amino acid and any non-natural amino acid; see specification as filed for detailed description of substitutions, R-groups and preferred embodiments
  MOD_RES (9)..(10): Any L- or D-natural amino acid and any non-natural amino acid; see specification as filed for detailed description of substitutions, R-groups and preferred embodiments
  MOD_RES (15)..(18): Any L- or D-natural or non-natural amino acid, and this range may encompass 1 or 4 residues; see specification as filed for detailed description of substitutions, R-groups and preferred embodiments
  c-term may be amidated
XLAADTPTXXFSYTXXXXEEWVQYVDDLELSA

SEQ ID NO: 745 - protein, 32 aa, Artificial Sequence
  Description of Artificial Sequence: Synthetic peptide
  MOD_RES (2)..(2): Any L- or D-natural amino acid and any non-natural amino acid; see specification as filed for detailed description of substitutions, R-groups and preferred embodiments
  MOD_RES (9)..(10): Any L- or D-natural amino acid and any non-natural amino acid; see specification as filed for detailed description of substitutions, R-groups and preferred embodiments
  MOD_RES (15)..(18): Any L- or D-natural or non-natural amino acid, and this range may encompass 1 or 4 residues; see specification as filed for detailed description of substitutions, R-groups and preferred embodiments
  c-term may be amidated
SXAADTPTXXFSYTXXXXEEWVQYVDDLELSA

SEQ ID NO: 746 - protein, 32 aa, Artificial Sequence
  Description of Artificial Sequence: Synthetic peptide
  MOD_RES (3)..(3): Any L- or D-natural amino acid and any non-natural amino acid; see specification as filed for detailed description of substitutions, R-groups and preferred embodiments
  MOD_RES (9)..(10): Any L- or D-natural amino acid and any non-natural amino acid; see specification as filed for detailed description of substitutions, R-groups and preferred embodiments
  MOD_RES (15)..(18): Any L- or D-natural or non-natural amino acid, and this range may encompass 1 or 4 residues; see specification as filed for detailed description of substitutions, R-groups and preferred embodiments
  c-term may be amidated
SLXADTPTXXFSYTXXXXEEWVQYVDDLELSA

SEQ ID NO: 747 - protein, 32 aa, Artificial Sequence
  Description of Artificial Sequence: Synthetic peptide
  MOD_RES (4)..(4): Any L- or D-natural amino acid and any non-natural amino acid; see specification as filed for detailed description of substitutions, R-groups and preferred embodiments
  MOD_RES (9)..(10): Any L- or D-natural amino acid and any non-natural amino acid; see specification as filed for detailed description of substitutions, R-groups and preferred embodiments
  MOD_RES (15)..(18): Any L- or D-natural or non-natural amino acid, and this range may encompass 1 or 4 residues; see specification as filed for detailed description of substitutions, R-groups and preferred embodiments
  c-term may be amidated
SLAXDTPTXXFSYTXXXXEEWVQYVDDLELSA

SEQ ID NO: 748 - protein, 32 aa, Artificial Sequence
  Description of Artificial Sequence: Synthetic peptide
  MOD_RES (5)..(5): Any L- or D-natural amino acid and any non-natural amino acid; see specification as filed for detailed description of substitutions, R-groups and preferred embodiments
  MOD_RES (9)..(10): Any L- or D-natural amino acid and any non-natural amino acid; see specification as filed for detailed description of substitutions, R-groups and preferred embodiments
  MOD_RES (15)..(18): Any L- or D-natural or non-natural amino acid, and this range may encompass 1 or 4 residues; see specification as filed for detailed description of substitutions, R-groups and preferred embodiments
  c-term may be amidated
SLAAXTPTXXFSYTXXXXEEWVQYVDDLELSA

SEQ ID NO: 749 - protein, 32 aa, Artificial Sequence
  Description of Artificial Sequence: Synthetic peptide
  MOD_RES (6)..(6): Any L- or D-natural amino acid and any non-natural amino acid; see specification as filed for detailed description of substitutions, R-groups and preferred embodiments
  MOD_RES (9)..(10): Any L- or D-natural amino acid and any non-natural amino acid; see specification as filed for detailed description of substitutions, R-groups and preferred embodiments
  MOD_RES (15)..(18): Any L- or D-natural or non-natural amino acid, and this range may encompass 1 or 4 residues; see specification as filed for detailed description of substitutions, R-groups and preferred embodiments
  c-term may be amidated
SLAADXPTXXFSYTXXXXEEWVQYVDDLELSA

SEQ ID NO: 750 - protein, 32 aa, Artificial Sequence
  Description of Artificial Sequence: Synthetic peptide
  MOD_RES (7)..(7): Any L- or D-natural amino acid and any non-natural amino acid; see specification as filed for detailed description of substitutions, R-groups and preferred embodiments
  MOD_RES (9)..(10): Any L- or D-natural amino acid and any non-natural amino acid; see specification as filed for detailed description of substitutions, R-groups and preferred embodiments
  MOD_RES (15)..(18): Any L- or D-natural or non-natural amino acid, and this range may encompass 1 or 4 residues; see specification as filed for detailed description of substitutions, R-groups and preferred embodiments
  c-term may be amidated
SLAADTXTXXFSYTXXXXEEWVQYVDDLELSA

SEQ ID NO: 751 - protein, 32 aa, Artificial Sequence
  Description of Artificial Sequence: Synthetic peptide
  MOD_RES (8)..(10): Any L- or D-natural amino acid and any non-natural amino acid; see specification as filed for detailed description of substitutions, R-groups and preferred embodiments
  MOD_RES (15)..(18): Any L- or D-natural or non-natural amino acid, and this range may encompass 1 or 4 residues; see specification as filed for detailed description of substitutions, R-groups and preferred embodiments
  c-term may be amidated
SLAADTPXXXFSYTXXXXEEWVQYVDDLELSA

SEQ ID NO: 752 - protein, 32 aa, Artificial Sequence
  Description of Artificial Sequence: Synthetic peptide
  MOD_RES (9)..(11): Any L- or D-natural amino acid and any non-natural amino acid; see specification as filed for detailed description of substitutions, R-groups and preferred embodiments
  MOD_RES (15)..(18): Any L- or D-natural or non-natural amino acid, and this range may encompass 1 or 4 residues; see specification as filed for detailed description of substitutions, R-groups and preferred embodiments
  c-term may be amidated
SLAADTPTXXXSYTXXXXEEWVQYVDDLELSA

SEQ ID NO: 753 - protein, 32 aa, Artificial Sequence
  Description of Artificial Sequence: Synthetic peptide
  MOD_RES (1)..(1): Any L- or D-natural amino acid and any non-natural amino acid; see specification as filed for detailed description of substitutions, R-groups and preferred embodiments
  MOD_RES (9)..(11): Any L- or D-natural amino acid and any non-natural amino acid; see specification as filed for detailed description of substitutions, R-groups and preferred embodiments
  MOD_RES (15)..(18): Any L- or D-natural or non-natural amino acid, and this range may encompass 1 or 4 residues; see specification as filed for detailed description of substitutions, R-groups and preferred embodiments
  c-term may be amidated
XLAADTPTXXXSYTXXXXEEWVQYVDDLELSA

SEQ ID NO: 754 - protein, 32 aa, Artificial Sequence
  Description of Artificial Sequence: Synthetic peptide
  MOD_RES (2)..(2): Any L- or D-natural amino acid and any non-natural amino acid; see specification as filed for detailed description of substitutions, R-groups and preferred embodiments
  MOD_RES (9)..(11): Any L- or D-natural amino acid and any non-natural amino acid; see specification as filed for detailed description of substitutions, R-groups and preferred embodiments
  MOD_RES (15)..(18): Any L- or D-natural or non-natural amino acid, and this range may encompass 1 or 4 residues; see specification as filed for detailed description of substitutions, R-groups and preferred embodiments
  c-term may be amidated
SXAADTPTXXXSYTXXXXEEWVQYVDDLELSA

SEQ ID NO: 755 - protein, 32 aa, Artificial Sequence
  Description of Artificial Sequence: Synthetic peptide
  MOD_RES (3)..(3): Any L- or D-natural amino acid and any non-natural amino acid; see specification as filed for detailed description of substitutions, R-groups and preferred embodiments
  MOD_RES (9)..(11): Any L- or D-natural amino acid and any non-natural amino acid; see specification as filed for detailed description of substitutions, R-groups and preferred embodiments
  MOD_RES (15)..(18): Any L- or D-natural or non-natural amino acid, and this range may encompass 1 or 4 residues; see specification as filed for detailed description of substitutions, R-groups and preferred embodiments
  c-term may be amidated
SLXADTPTXXXSYTXXXXEEWVQYVDDLELSA

SEQ ID NO: 756 - protein, 32 aa, Artificial Sequence
  Description of Artificial Sequence: Synthetic peptide
  MOD_RES (4)..(4): Any L- or D-natural amino acid and any non-natural amino acid; see specification as filed for detailed description of substitutions, R-groups and preferred embodiments
  MOD_RES (9)..(11): Any L- or D-natural amino acid and any non-natural amino acid; see specification as filed for detailed description of substitutions, R-groups and preferred embodiments
  MOD_RES (15)..(18): Any L- or D-natural or non-natural amino acid, and this range may encompass 1 or 4 residues; see specification as filed for detailed description of substitutions, R-groups and preferred embodiments
  c-term may be amidated
SLAXDTPTXXXSYTXXXXEEWVQYVDDLELSA

SEQ ID NO: 757 - protein, 32 aa, Artificial Sequence
  Description of Artificial Sequence: Synthetic peptide
  MOD_RES (5)..(5): Any L- or D-natural amino acid and any non-natural amino acid; see specification as filed for detailed description of substitutions, R-groups and preferred embodiments
  MOD_RES (9)..(11): Any L- or D-natural amino acid and any non-natural amino acid; see specification as filed for detailed description of substitutions, R-groups and preferred embodiments
  MOD_RES (15)..(18): Any L- or D-natural or non-natural amino acid, and this range may encompass 1 or 4 residues; see specification as filed for detailed description of substitutions, R-groups and preferred embodiments
  c-term may be amidated
SLAAXTPTXXXSYTXXXXEEWVQYVDDLELSA

SEQ ID NO: 758 - protein, 32 aa, Artificial Sequence
  Description of Artificial Sequence: Synthetic peptide
  MOD_RES (6)..(6): Any L- or D-natural amino acid and any non-natural amino acid; see specification as filed for detailed description of substitutions, R-groups and preferred embodiments
  MOD_RES (9)..(11): Any L- or D-natural amino acid and any non-natural amino acid; see specification as filed for detailed description of substitutions, R-groups and preferred embodiments
  MOD_RES (15)..(18): Any L- or D-natural or non-natural amino acid, and this range may encompass 1 or 4 residues; see specification as filed for detailed description of substitutions, R-groups and preferred embodiments
  c-term may be amidated
SLAADXPTXXXSYTXXXXEEWVQYVDDLELSA

SEQ ID NO: 759 - protein, 32 aa, Artificial Sequence
  Description of Artificial Sequence: Synthetic peptide
  MOD_RES (7)..(7): Any L- or D-natural amino acid and any non-natural amino acid; see specification as filed for detailed description of substitutions, R-groups and preferred embodiments
  MOD_RES (9)..(11): Any L- or D-natural amino acid and any non-natural amino acid; see specification as filed for detailed description of substitutions, R-groups and preferred embodiments
  MOD_RES (15)..(18): Any L- or D-natural or non-natural amino acid, and this range may encompass 1 or 4 residues; see specification as filed for detailed description of substitutions, R-groups and preferred embodiments
  c-term may be amidated
SLAADTXTXXXSYTXXXXEEWVQYVDDLELSA

SEQ ID NO: 760 - protein, 32 aa, Artificial Sequence
  Description of Artificial Sequence: Synthetic peptide
  MOD_RES (8)..(11): Any L- or D-natural amino acid and any non-natural amino acid; see specification as filed for detailed description of substitutions, R-groups and preferred embodiments
  MOD_RES (15)..(18): Any L- or D-natural or non-natural amino acid, and this range may encompass 1 or 4 residues; see specification as filed for detailed description of substitutions, R-groups and preferred embodiments
  c-term may be amidated
SLAADTPXXXXSYTXXXXEEWVQYVDDLELSA

SEQ ID NO: 761 - protein, 32 aa, Artificial Sequence
  Description of Artificial Sequence: Synthetic peptide
  MOD_RES (9)..(10): Any L- or D-natural amino acid and any non-natural amino acid; see specification as filed for detailed description of substitutions, R-groups and preferred embodiments
  MOD_RES (12)..(12): Any L- or D-natural amino acid and any non-natural amino acid; see specification as filed for detailed description of substitutions, R-groups and preferred embodiments
  MOD_RES (15)..(18): Any L- or D-natural or non-natural amino acid, and this range may encompass 1 or 4 residues; see specification as filed for detailed description of substitutions, R-groups and preferred embodiments
  c-term may be amidated
SLAADTPTXXFXYTXXXXEEWVQYVDDLELSA

SEQ ID NO: 762 - protein, 32 aa, Artificial Sequence
  Description of Artificial Sequence: Synthetic peptide
  MOD_RES (1)..(1): Any L- or D-natural amino acid and any non-natural amino acid; see specification as filed for detailed description of substitutions, R-groups and preferred embodiments
  MOD_RES (9)..(10): Any L- or D-natural amino acid and any non-natural amino acid; see specification as filed for detailed description of substitutions, R-groups and preferred embodiments
  MOD_RES (12)..(12): Any L- or D-natural amino acid and any non-natural amino acid; see specification as filed for detailed description of substitutions, R-groups and preferred embodiments
  MOD_RES (15)..(18): Any L- or D-natural or non-natural amino acid, and this range may encompass 1 or 4 residues; see specification as filed for detailed description of substitutions, R-groups and preferred embodiments
  c-term may be amidated
XLAADTPTXXFXYTXXXXEEWVQYVDDLELSA

SEQ ID NO: 763 - protein, 32 aa, Artificial Sequence
  Description of Artificial Sequence: Synthetic peptide
  MOD_RES (2)..(2): Any L- or D-natural amino acid and any non-natural amino acid; see specification as filed for detailed description of substitutions, R-groups and preferred embodiments
  MOD_RES (9)..(10): Any L- or D-natural amino acid and any non-natural amino acid; see specification as filed for detailed description of substitutions, R-groups and preferred embodiments
  MOD_RES (12)..(12): Any L- or D-natural amino acid and any non-natural amino acid; see specification as filed for detailed description of substitutions, R-groups and preferred embodiments
  MOD_RES (15)..(18): Any L- or D-natural or non-natural amino acid, and this range may encompass 1 or 4 residues; see specification as filed for detailed description of substitutions, R-groups and preferred embodiments
  c-term may be amidated
SXAADTPTXXFXYTXXXXEEWVQYVDDLELSA

SEQ ID NO: 764 - protein, 32 aa, Artificial Sequence
  Description of Artificial Sequence: Synthetic peptide
  MOD_RES (3)..(3): Any L- or D-natural amino acid and any non-natural amino acid; see specification as filed for detailed description of substitutions, R-groups and preferred embodiments
  MOD_RES (9)..(10): Any L- or D-natural amino acid and any non-natural amino acid; see specification as filed for detailed description of substitutions, R-groups and preferred embodiments
  MOD_RES (12)..(12): Any L- or D-natural amino acid and any non-natural amino acid; see specification as filed for detailed description of substitutions, R-groups and preferred embodiments
  MOD_RES (15)..(18): Any L- or D-natural or non-natural amino acid, and this range may encompass 1 or 4 residues; see specification as filed for detailed description of substitutions, R-groups and preferred embodiments
  c-term may be amidated
SLXADTPTXXFXYTXXXXEEWVQYVDDLELSA

SEQ ID NO: 765 - protein, 32 aa, Artificial Sequence
  Description of Artificial Sequence: Synthetic peptide
  MOD_RES (4)..(4): Any L- or D-natural amino acid and any non-natural amino acid; see specification as filed for detailed description of substitutions, R-groups and preferred embodiments
  MOD_RES (9)..(10): Any L- or D-natural amino acid and any non-natural amino acid; see specification as filed for detailed description of substitutions, R-groups and preferred embodiments
  MOD_RES (12)..(12): Any L- or D-natural amino acid and any non-natural amino acid; see specification as filed for detailed description of substitutions, R-groups and preferred embodiments
  MOD_RES (15)..(18): Any L- or D-natural or non-natural amino acid, and this range may encompass 1 or 4 residues; see specification as filed for detailed description of substitutions, R-groups and preferred embodiments
  c-term may be amidated
SLAXDTPTXXFXYTXXXXEEWVQYVDDLELSA

SEQ ID NO: 766 - protein, 32 aa, Artificial Sequence
  Description of Artificial Sequence: Synthetic peptide
  MOD_RES (5)..(5): Any L- or D-natural amino acid and any non-natural amino acid; see specification as filed for detailed description of substitutions, R-groups and preferred embodiments
  MOD_RES (9)..(10): Any L- or D-natural amino acid and any non-natural amino acid; see specification as filed for detailed description of substitutions, R-groups and preferred embodiments
  MOD_RES (12)..(12): Any L- or D-natural amino acid and any non-natural amino acid; see specification as filed for detailed description of substitutions, R-groups and preferred embodiments
  MOD_RES (15)..(18): Any L- or D-natural or non-natural amino acid, and this range may encompass 1 or 4 residues; see specification as filed for detailed description of substitutions, R-groups and preferred embodiments
  c-term may be amidated
SLAAXTPTXXFXYTXXXXEEWVQYVDDLELSA

SEQ ID NO: 767 - protein, 32 aa, Artificial Sequence
  Description of Artificial Sequence: Synthetic peptide
  MOD_RES (6)..(6): Any L- or D-natural amino acid and any non-natural amino acid; see specification as filed for detailed description of substitutions, R-groups and preferred embodiments
  MOD_RES (9)..(10): Any L- or D-natural amino acid and any non-natural amino acid; see specification as filed for detailed description of substitutions, R-groups and preferred embodiments
  MOD_RES (12)..(12): Any L- or D-natural amino acid and any non-natural amino acid; see specification as filed for detailed description of substitutions, R-groups and preferred embodiments
  MOD_RES (15)..(18): Any L- or D-natural or non-natural amino acid, and this range may encompass 1 or 4 residues; see specification as filed for detailed description of substitutions, R-groups and preferred embodiments
  c-term may be amidated
SLAADXPTXXFXYTXXXXEEWVQYVDDLELSA

SEQ ID NO: 768 - protein, 32 aa, Artificial Sequence
  Description of Artificial Sequence: Synthetic peptide
  MOD_RES (7)..(7): Any L- or D-natural amino acid and any non-natural amino acid; see specification as filed for detailed description of substitutions, R-groups and preferred embodiments
  MOD_RES (9)..(10): Any L- or D-natural amino acid and any non-natural amino acid; see specification as filed for detailed description of substitutions, R-groups and preferred embodiments
  MOD_RES (12)..(12): Any L- or D-natural amino acid and any non-natural amino acid; see specification as filed for detailed description of substitutions, R-groups and preferred embodiments
  MOD_RES (15)..(18): Any L- or D-natural or non-natural amino acid, and this range may encompass 1 or 4 residues; see specification as filed for detailed description of substitutions, R-groups and preferred embodiments
  c-term may be amidated
SLAADTXTXXFXYTXXXXEEWVQYVDDLELSA

SEQ ID NO: 769 - protein, 32 aa, Artificial Sequence
  Description of Artificial Sequence: Synthetic peptide
  MOD_RES (8)..(10): Any L- or D-natural amino acid and any non-natural amino acid; see specification as filed for detailed description of substitutions, R-groups and preferred embodiments
  MOD_RES (12)..(12): Any L- or D-natural amino acid and any non-natural amino acid; see specification as filed for detailed description of substitutions, R-groups and preferred embodiments
  MOD_RES (15)..(18): Any L- or D-natural or non-natural amino acid, and this range may encompass 1 or 4 residues; see specification as filed for detailed description of substitutions, R-groups and preferred embodiments
  c-term may be amidated
SLAADTPXXXFXYTXXXXEEWVQYVDDLELSA

SEQ ID NO: 770 - protein, 32 aa, Artificial Sequence
  Description of Artificial Sequence: Synthetic peptide
  MOD_RES (9)..(10): Any L- or D-natural amino acid and any non-natural amino acid; see specification as filed for detailed description of substitutions, R-groups and preferred embodiments
  MOD_RES (13)..(13): Any L- or D-natural amino acid and any non-natural amino acid; see specification as filed for detailed description of substitutions, R-groups and preferred embodiments
  MOD_RES (15)..(18): Any L- or D-natural or non-natural amino acid, and this range may encompass 1 or 4 residues; see specification as filed for detailed description of substitutions, R-groups and preferred embodiments
  c-term may be amidated
SLAADTPTXXFSXTXXXXEEWVQYVDDLELSA

SEQ ID NO: 771 - protein, 32 aa, Artificial Sequence
  Description of Artificial Sequence: Synthetic peptide
  MOD_RES (1)..(1): Any L- or D-natural amino acid and any non-natural amino acid; see specification as filed for detailed description of substitutions, R-groups and preferred embodiments
  MOD_RES (9)..(10): Any L- or D-natural amino acid and any non-natural amino acid; see specification as filed for detailed description of substitutions, R-groups and preferred embodiments
  MOD_RES (13)..(13): Any L- or D-natural amino acid and any non-natural amino acid; see specification as filed for detailed description of substitutions, R-groups and preferred embodiments
  MOD_RES (15)..(18): Any L- or D-natural or non-natural amino acid, and this range may encompass 1 or 4 residues; see specification as filed for detailed description of substitutions, R-groups and preferred embodiments
  c-term may be amidated
XLAADTPTXXFSXTXXXXEEWVQYVDDLELSA

SEQ ID NO: 772 - protein, 32 aa, Artificial Sequence
  Description of Artificial Sequence: Synthetic peptide
  MOD_RES (2)..(2): Any L- or D-natural amino acid and any non-natural amino acid; see specification as filed for detailed description of substitutions, R-groups and preferred embodiments
  MOD_RES (9)..(10): Any L- or D-natural amino acid and any non-natural amino acid; see specification as filed for detailed description of substitutions, R-groups and preferred embodiments
  MOD_RES (13)..(13): Any L- or D-natural amino acid and any non-natural amino acid; see specification as filed for detailed description of substitutions, R-groups and preferred embodiments
  MOD_RES (15)..(18): Any L- or D-natural or non-natural amino acid, and this range may encompass 1 or 4 residues; see specification as filed for detailed description of substitutions, R-groups and preferred embodiments
  c-term may be amidated
SXAADTPTXXFSXTXXXXEEWVQYVDDLELSA

SEQ ID NO: 773 - protein, 32 aa, Artificial Sequence
  Description of Artificial Sequence: Synthetic peptide
  MOD_RES (3)..(3): Any L- or D-natural amino acid and any non-natural amino acid; see specification as filed for detailed description of substitutions, R-groups and preferred embodiments
  MOD_RES (9)..(10): Any L- or D-natural amino acid and any non-natural amino acid; see specification as filed for detailed description of substitutions, R-groups and preferred embodiments
  MOD_RES (13)..(13): Any L- or D-natural amino acid and any non-natural amino acid; see specification as filed for detailed description of substitutions, R-groups and preferred embodiments
  MOD_RES (15)..(18): Any L- or D-natural or non-natural amino acid, and this range may encompass 1 or 4 residues; see specification as filed for detailed description of substitutions, R-groups and preferred embodiments
  c-term may be amidated
SLXADTPTXXFSXTXXXXEEWVQYVDDLELSA

SEQ ID NO: 774 - protein, 32 aa, Artificial Sequence
  Description of Artificial Sequence: Synthetic peptide
  MOD_RES (4)..(4): Any L- or D-natural amino acid and any non-natural amino acid; see specification as filed for detailed description of substitutions, R-groups and preferred embodiments
  MOD_RES (9)..(10): Any L- or D-natural amino acid and any non-natural amino acid; see specification as filed for detailed description of substitutions, R-groups and preferred embodiments
  MOD_RES (13)..(13): Any L- or D-natural amino acid and any non-natural amino acid; see specification as filed for detailed description of substitutions, R-groups and preferred embodiments
  MOD_RES (15)..(18): Any L- or D-natural or non-natural amino acid, and this range may encompass 1 or 4 residues; see specification as filed for detailed description of substitutions, R-groups and preferred embodiments
  c-term may be amidated
SLAXDTPTXXFSXTXXXXEEWVQYVDDLELSA

SEQ ID NO: 775 - protein, 32 aa, Artificial Sequence
  Description of Artificial Sequence: Synthetic peptide
  MOD_RES (5)..(5): Any L- or D-natural amino acid and any non-natural amino acid; see specification as filed for detailed description of substitutions, R-groups and preferred embodiments
  MOD_RES (9)..(10): Any L- or D-natural amino acid and any non-natural amino acid; see specification as filed for detailed description of substitutions, R-groups and preferred embodiments
  MOD_RES (13)..(13): Any L- or D-natural amino acid and any non-natural amino acid; see specification as filed for detailed description of substitutions, R-groups and preferred embodiments
  MOD_RES (15)..(18): Any L- or D-natural or non-natural amino acid, and this range may encompass 1 or 4 residues; see specification as filed for detailed description of substitutions, R-groups and preferred embodiments
  c-term may be amidated
SLAAXTPTXXFSXTXXXXEEWVQYVDDLELSA

SEQ ID NO: 776 - protein, 32 aa, Artificial Sequence
  Description of Artificial Sequence: Synthetic peptide
  MOD_RES (6)..(6): Any L- or D-natural amino acid and any non-natural amino acid; see specification as filed for detailed description of substitutions, R-groups and preferred embodiments
  MOD_RES (9)..(10): Any L- or D-natural amino acid and any non-natural amino acid; see specification as filed for detailed description of substitutions, R-groups and preferred embodiments
  MOD_RES (13)..(13): Any L- or D-natural amino acid and any non-natural amino acid; see specification as filed for detailed description of substitutions, R-groups and preferred embodiments
  MOD_RES (15)..(18): Any L- or D-natural or non-natural amino acid, and this range may encompass 1 or 4 residues; see specification as filed for detailed description of substitutions, R-groups and preferred embodiments
  c-term may be amidated
SLAADXPTXXFSXTXXXXEEWVQYVDDLELSA

SEQ ID NO: 777 - protein, 32 aa, Artificial Sequence
  Description of Artificial Sequence: Synthetic peptide
  MOD_RES (7)..(7): Any L- or D-natural amino acid and any non-natural amino acid; see specification as filed for detailed description of substitutions, R-groups and preferred embodiments
  MOD_RES (9)..(10): Any L- or D-natural amino acid and any non-natural amino acid; see specification as filed for detailed description of substitutions, R-groups and preferred embodiments
  MOD_RES (13)..(13): Any L- or D-natural amino acid and any non-natural amino acid; see specification as filed for detailed description of substitutions, R-groups and preferred embodiments
  MOD_RES (15)..(18): Any L- or D-natural or non-natural amino acid, and this range may encompass 1 or 4 residues; see specification as filed for detailed description of substitutions, R-groups and preferred embodiments
  c-term may be amidated
SLAADTXTXXFSXTXXXXEEWVQYVDDLELSA

SEQ ID NO: 778 - protein, 32 aa, Artificial Sequence
  Description of Artificial Sequence: Synthetic peptide
  MOD_RES (8)..(10): Any L- or D-natural amino acid and any non-natural amino acid; see specification as filed for detailed description of substitutions, R-groups and preferred embodiments
  MOD_RES (13)..(13): Any L- or D-natural amino acid and any non-natural amino acid; see specification as filed for detailed description of substitutions, R-groups and preferred embodiments
  MOD_RES (15)..(18): Any L- or D-natural or non-natural amino acid, and this range may encompass 1 or 4 residues; see specification as filed for detailed description of substitutions, R-groups and preferred embodiments
  c-term may be amidated
SLAADTPXXXFSXTXXXXEEWVQYVDDLELSA

SEQ ID NO: 779 - protein, 32 aa, Artificial Sequence
  Description of Artificial Sequence: Synthetic peptide
  MOD_RES (9)..(10): Any L- or D-natural amino acid and any non-natural amino acid; see specification as filed for detailed description of substitutions, R-groups and preferred embodiments
  MOD_RES (14)..(14): Any L- or D-natural amino acid and any non-natural amino acid; see specification as filed for detailed description of substitutions, R-groups and preferred embodiments
  MOD_RES (15)..(18): Any L- or D-natural or non-natural amino acid, and this range may encompass 1 or 4 residues; see specification as filed for detailed description of substitutions, R-groups and preferred embodiments
  c-term may be amidated
SLAADTPTXXFSYXXXXXEEWVQYVDDLELSA

SEQ ID NO: 780 - protein, 32 aa, Artificial Sequence
  Description of Artificial Sequence: Synthetic peptide
  MOD_RES (1)..(1): Any L- or D-natural amino acid and any non-natural amino acid; see specification as filed for detailed description of substitutions, R-groups and preferred embodiments
  MOD_RES (9)..(10): Any L- or D-natural amino acid and any non-natural amino acid; see specification as filed for detailed description of substitutions, R-groups and preferred embodiments
  MOD_RES (14)..(14): Any L- or D-natural amino acid and any non-natural amino acid; see specification as filed for detailed description of substitutions, R-groups and preferred embodiments
  MOD_RES (15)..(18): Any L- or D-natural or non-natural amino acid, and this range may encompass 1 or 4 residues; see specification as filed for detailed description of substitutions, R-groups and preferred embodiments
  c-term may be amidated
XLAADTPTXXFSYXXXXXEEWVQYVDDLELSA

SEQ ID NO: 781 - protein, 32 aa, Artificial Sequence
  Description of Artificial Sequence: Synthetic peptide
  MOD_RES (2)..(2): Any L- or D-natural amino acid and any non-natural amino acid; see specification as filed for detailed description of substitutions, R-groups and preferred embodiments
  MOD_RES (9)..(10): Any L- or D-natural amino acid and any non-natural amino acid; see specification as filed for detailed description of substitutions, R-groups and preferred embodiments
  MOD_RES (14)..(14): Any L- or D-natural amino acid and any non-natural amino acid; see specification as filed for detailed description of substitutions, R-groups and preferred embodiments
  MOD_RES (15)..(18): Any L- or D-natural or non-natural amino acid, and this range may encompass 1 or 4 residues; see specification as filed for detailed description of substitutions, R-groups and preferred embodiments
  c-term may be amidated
SXAADTPTXXFSYXXXXXEEWVQYVDDLELSA

SEQ ID NO: 782 - protein, 32 aa, Artificial Sequence
  Description of Artificial Sequence: Synthetic peptide
  MOD_RES (3)..(3): Any L- or D-natural amino acid and any non-natural amino acid; see specification as filed for detailed description of substitutions, R-groups and preferred embodiments
  MOD_RES (9)..(10): Any L- or D-natural amino acid and any non-natural amino acid; see specification as filed for detailed description of substitutions, R-groups and preferred embodiments
  MOD_RES (14)..(14): Any L- or D-natural amino acid and any non-natural amino acid; see specification as filed for detailed description of substitutions, R-groups and preferred embodiments
  MOD_RES (15)..(18): Any L- or D-natural or non-natural amino acid, and this range may encompass 1 or 4 residues; see specification as filed for detailed description of substitutions, R-groups and preferred embodiments
  c-term may be amidated
SLXADTPTXXFSYXXXXXEEWVQYVDDLELSA

SEQ ID NO: 783 - protein, 32 aa, Artificial Sequence
  Description of Artificial Sequence: Synthetic peptide
  MOD_RES (4)..(4): Any L- or D-natural amino acid and any non-natural amino acid; see specification as filed for detailed description of substitutions, R-groups and preferred embodiments
  MOD_RES (9)..(10): Any L- or D-natural amino acid and any non-natural amino acid; see specification as filed for detailed description of substitutions, R-groups and preferred embodiments
  MOD_RES (14)..(14): Any L- or D-natural amino acid and any non-natural amino acid; see specification as filed for detailed description of substitutions, R-groups and preferred embodiments
  MOD_RES (15)..(18): Any L- or D-natural or non-natural amino acid, and this range may encompass 1 or 4 residues; see specification as filed for detailed description of substitutions, R-groups and preferred embodiments
  c-term may be amidated
SLAXDTPTXXFSYXXXXXEEWVQYVDDLELSA

SEQ ID NO: 784 - protein, 32 aa, Artificial Sequence
  Description of Artificial Sequence: Synthetic peptide
  MOD_RES (5)..(5): Any L- or D-natural amino acid and any non-natural amino acid; see specification as filed for detailed description of substitutions, R-groups and preferred embodiments
  MOD_RES (9)..(10): Any L- or D-natural amino acid and any non-natural amino acid; see specification as filed for detailed description of substitutions, R-groups and preferred embodiments
  MOD_RES (14)..(14): Any L- or D-natural amino acid and any non-natural amino acid; see specification as filed for detailed description of substitutions, R-groups and preferred embodiments
  MOD_RES (15)..(18): Any L- or D-natural or non-natural amino acid, and this range may encompass 1 or 4 residues; see specification as filed for detailed description of substitutions, R-groups and preferred embodiments
  c-term may be amidated
SLAAXTPTXXFSYXXXXXEEWVQYVDDLELSA

SEQ ID NO: 785 - protein, 32 aa, Artificial Sequence
  Description of Artificial Sequence: Synthetic peptide
  MOD_RES (6)..(6): Any L- or D-natural amino acid and any non-natural amino acid; see specification as filed for detailed description of substitutions, R-groups and preferred embodiments
  MOD_RES (9)..(10): Any L- or D-natural amino acid and any non-natural amino acid; see specification as filed for detailed description of substitutions, R-groups and preferred embodiments
  MOD_RES (14)..(14): Any L- or D-natural amino acid and any non-natural amino acid; see specification as filed for detailed description of substitutions, R-groups and preferred embodiments
  MOD_RES (15)..(18): Any L- or D-natural or non-natural amino acid, and this range may encompass 1 or 4 residues; see specification as filed for detailed description of substitutions, R-groups and preferred embodiments
  c-term may be amidated
SLAADXPTXXFSYXXXXXEEWVQYVDDLELSA

SEQ ID NO: 786 - protein, 32 aa, Artificial Sequence
  Description of Artificial Sequence: Synthetic peptide
  MOD_RES (7)..(7): Any L- or D-natural amino acid and any non-natural amino acid; see specification as filed for detailed description of substitutions, R-groups and preferred embodiments
  MOD_RES (9)..(10): Any L- or D-natural amino acid and any non-natural amino acid; see specification as filed for detailed description of substitutions, R-groups and preferred embodiments
  MOD_RES (14)..(14): Any L- or D-natural amino acid and any non-natural amino acid; see specification as filed for detailed description of substitutions, R-groups and preferred embodiments
  MOD_RES (15)..(18): Any L- or D-natural or non-natural amino acid, and this range may encompass 1 or 4 residues; see specification as filed for detailed description of substitutions, R-groups and preferred embodiments
  c-term may be amidated
SLAADTXTXXFSYXXXXXEEWVQYVDDLELSA

SEQ ID NO: 787 - protein, 32 aa, Artificial Sequence
  Description of Artificial Sequence: Synthetic peptide
  MOD_RES (8)..(10): Any L- or D-natural amino acid and any non-natural amino acid; see specification as filed for detailed description of substitutions, R-groups and preferred embodiments
  MOD_RES (14)..(14): Any L- or D-natural amino acid and any non-natural amino acid; see specification as filed for detailed description of substitutions, R-groups and preferred embodiments
  MOD_RES (15)..(18): Any L- or D-natural or non-natural amino acid, and this range may encompass 1 or 4 residues; see specification as filed for detailed description of substitutions, R-groups and preferred embodiments
  c-term may be amidated
SLAADTPXXXFSYXXXXXEEWVQYVDDLELSA

SEQ ID NO: 788 - protein, 32 aa, Artificial Sequence
  Description of Artificial Sequence: Synthetic peptide
  MOD_RES (15)..(18): Any L- or D-natural or non-natural amino acid, and this range may encompass 1 or 4 residues; see specification as filed for detailed description of substitutions, R-groups and preferred embodiments
  c-term may be amidated
SLAADTPTCCFSYTXXXXEEWVKYVDDLELSA

SEQ ID NO: 789 - protein, 32 aa, Artificial Sequence
  Description of Artificial Sequence: Synthetic peptide
  MOD_RES (9)..(10): Any L- or D-natural amino acid and any non-natural amino acid; see specification as filed for detailed description of substitutions, R-groups and preferred embodiments
  MOD_RES (15)..(18): Any L- or D-natural or non-natural amino acid, and this range may encompass 1 or 4 residues; see specification as filed for detailed description of substitutions, R-groups and preferred embodiments
  c-term may be amidated
SLAADTPTXXFSYTXXXXEEWVKYVDDLELSA

SEQ ID NO: 790 - protein, 32 aa, Artificial Sequence
  Description of Artificial Sequence: Synthetic peptide
  MOD_RES (1)..(1): Any L- or D-natural amino acid and any non-natural amino acid; see specification as filed for detailed description of substitutions, R-groups and preferred embodiments
  MOD_RES (9)..(10): Any L- or D-natural amino acid and any non-natural amino acid; see specification as filed for detailed description of substitutions, R-groups and preferred embodiments
  MOD_RES (15)..(18): Any L- or D-natural or non-natural amino acid, and this range may encompass 1 or 4 residues; see specification as filed for detailed description of substitutions, R-groups and preferred embodiments
  c-term may be amidated
XLAADTPTXXFSYTXXXXEEWVKYVDDLELSA

SEQ ID NO: 791 - protein, 32 aa, Artificial Sequence
  Description of Artificial Sequence: Synthetic peptide
  MOD_RES (2)..(2): Any L- or D-natural amino acid and any non-natural amino acid; see specification as filed for detailed description of substitutions, R-groups and preferred embodiments
  MOD_RES (9)..(10): Any L- or D-natural amino acid and any non-natural amino acid; see specification as filed for detailed description of substitutions, R-groups and preferred embodiments
  MOD_RES (15)..(18): Any L- or D-natural or non-natural amino acid, and this range may encompass 1 or 4 residues; see specification as filed for detailed description of substitutions, R-groups and preferred embodiments
  c-term may be amidated
SXAADTPTXXFSYTXXXXEEWVKYVDDLELSA

SEQ ID NO: 792 - protein, 32 aa, Artificial Sequence
  Description of Artificial Sequence: Synthetic peptide
  MOD_RES (3)..(3): Any L- or D-natural amino acid and any non-natural amino acid; see specification as filed for detailed description of substitutions, R-groups and preferred embodiments
  MOD_RES (9)..(10): Any L- or D-natural amino acid and any non-natural amino acid; see specification as filed for detailed description of substitutions, R-groups and preferred embodiments
  MOD_RES (15)..(18): Any L- or D-natural or non-natural amino acid, and this range may encompass 1 or 4 residues; see specification as filed for detailed description of substitutions, R-groups and preferred embodiments
  c-term may be amidated
SLXADTPTXXFSYTXXXXEEWVKYVDDLELSA

SEQ ID NO: 793 - protein, 32 aa, Artificial Sequence
  Description of Artificial Sequence: Synthetic peptide
  MOD_RES (4)..(4): Any L- or D-natural amino acid and any non-natural amino acid; see specification as filed for detailed description of substitutions, R-groups and preferred embodiments
  MOD_RES (9)..(10): Any L- or D-natural amino acid and any non-natural amino acid; see specification as filed for detailed description of substitutions, R-groups and preferred embodiments
  MOD_RES (15)..(18): Any L- or D-natural or non-natural amino acid, and this range may encompass 1 or 4 residues; see specification as filed for detailed description of substitutions, R-groups and preferred embodiments
  c-term may be amidated
SLAXDTPTXXFSYTXXXXEEWVKYVDDLELSA

SEQ ID NO: 794 - protein, 32 aa, Artificial Sequence
  Description of Artificial Sequence: Synthetic peptide
  MOD_RES (5)..(5): Any L- or D-natural amino acid and any non-natural amino acid; see specification as filed for detailed description of substitutions, R-groups and preferred embodiments
  MOD_RES (9)..(10): Any L- or D-natural amino acid and any non-natural amino acid; see specification as filed for detailed description of substitutions, R-groups and preferred embodiments
  MOD_RES (15)..(18): Any L- or D-natural or non-natural amino acid, and this range may encompass 1 or 4 residues; see specification as filed for detailed description of substitutions, R-groups and preferred embodiments
  c-term may be amidated
SLAAXTPTXXFSYTXXXXEEWVKYVDDLELSA

SEQ ID NO: 795 - protein, 32 aa, Artificial Sequence
  Description of Artificial Sequence: Synthetic peptide
  MOD_RES (6)..(6): Any L- or D-natural amino acid and any non-natural amino acid; see specification as filed for detailed description of substitutions, R-groups and preferred embodiments
  MOD_RES (9)..(10): Any L- or D-natural amino acid and any non-natural amino acid; see specification as filed for detailed description of substitutions, R-groups and preferred embodiments
  MOD_RES (15)..(18): Any L- or D-natural or non-natural amino acid, and this range may encompass 1 or 4 residues; see specification as filed for detailed description of substitutions, R-groups and preferred embodiments
  c-term may be amidated
SLAADXPTXXFSYTXXXXEEWVKYVDDLELSA

SEQ ID NO: 796 - protein, 32 aa, Artificial Sequence
  Description of Artificial Sequence: Synthetic peptide
  MOD_RES (7)..(7): Any L- or D-natural amino acid and any non-natural amino acid; see specification as filed for detailed description of substitutions, R-groups and preferred embodiments
  MOD_RES (9)..(10): Any L- or D-natural amino acid and any non-natural amino acid; see specification as filed for detailed description of substitutions, R-groups and preferred embodiments
  MOD_RES (15)..(18): Any L- or D-natural or non-natural amino acid, and this range may encompass 1 or 4 residues; see specification as filed for detailed description of substitutions, R-groups and preferred embodiments
  c-term may be amidated
SLAADTXTXXFSYTXXXXEEWVKYVDDLELSA

SEQ ID NO: 797 - protein, 32 aa, Artificial Sequence
  Description of Artificial Sequence: Synthetic peptide
  MOD_RES (8)..(10): Any L- or D-natural amino acid and any non-natural amino acid; see specification as filed for detailed description of substitutions, R-groups and preferred embodiments
  MOD_RES (15)..(18): Any L- or D-natural or non-natural amino acid, and this range may encompass 1 or 4 residues; see specification as filed for detailed description of substitutions, R-groups and preferred embodiments
  c-term may be amidated
SLAADTPXXXFSYTXXXXEEWVKYVDDLELSA

SEQ ID NO: 798 - protein, 32 aa, Artificial Sequence
  Description of Artificial Sequence: Synthetic peptide
  MOD_RES (9)..(11): Any L- or D-natural amino acid and any non-natural amino acid; see specification as filed for detailed description of substitutions, R-groups and preferred embodiments
  MOD_RES (15)..(18): Any L- or D-natural or non-natural amino acid, and this range may encompass 1 or 4 residues; see specification as filed for detailed description of substitutions, R-groups and preferred embodiments
  c-term may be amidated
SLAADTPTXXXSYTXXXXEEWVKYVDDLELSA

SEQ ID NO: 799 - protein, 32 aa, Artificial Sequence
  Description of Artificial Sequence: Synthetic peptide
  MOD_RES (1)..(1): Any L- or D-natural amino acid and any non-natural amino acid; see specification as filed for detailed description of substitutions, R-groups and preferred embodiments
  MOD_RES (9)..(11): Any L- or D-natural amino acid and any non-natural amino acid; see specification as filed for detailed description of substitutions, R-groups and preferred embodiments
  MOD_RES (15)..(18): Any L- or D-natural or non-natural amino acid, and this range may encompass 1 or 4 residues; see specification as filed for detailed description of substitutions, R-groups and preferred embodiments
  c-term may be amidated
XLAADTPTXXXSYTXXXXEEWVKYVDDLELSA

SEQ ID NO: 800 - protein, 32 aa, Artificial Sequence
  Description of Artificial Sequence: Synthetic peptide
  MOD_RES (2)..(2): Any L- or D-natural amino acid and any non-natural amino acid; see specification as filed for detailed description of substitutions, R-groups and preferred embodiments
  MOD_RES (9)..(11): Any L- or D-natural amino acid and any non-natural amino acid; see specification as filed for detailed description of substitutions, R-groups and preferred embodiments
  MOD_RES (15)..(18): Any L- or D-natural or non-natural amino acid, and this range may encompass 1 or 4 residues; see specification as filed for detailed description of substitutions, R-groups and preferred embodiments
  c-term may be amidated
SXAADTPTXXXSYTXXXXEEWVKYVDDLELSA

SEQ ID NO: 801 - protein, 32 aa, Artificial Sequence
  Description of Artificial Sequence: Synthetic peptide
  MOD_RES (3)..(3): Any L- or D-natural amino acid and any non-natural amino acid; see specification as filed for detailed description of substitutions, R-groups and preferred embodiments
  MOD_RES (9)..(11): Any L- or D-natural amino acid and any non-natural amino acid; see specification as filed for detailed description of substitutions, R-groups and preferred embodiments
  MOD_RES (15)..(18): Any L- or D-natural or non-natural amino acid, and this range may encompass 1 or 4 residues; see specification as filed for detailed description of substitutions, R-groups and preferred embodiments
  c-term may be amidated
SLXADTPTXXXSYTXXXXEEWVKYVDDLELSA

SEQ ID NO: 802 - protein, 32 aa, Artificial Sequence
  Description of Artificial Sequence: Synthetic peptide
  MOD_RES (4)..(4): Any L- or D-natural amino acid and any non-natural amino acid; see specification as filed for detailed description of substitutions, R-groups and preferred embodiments
  MOD_RES (9)..(11): Any L- or D-natural amino acid and any non-natural amino acid; see specification as filed for detailed description of substitutions, R-groups and preferred embodiments
  MOD_RES (15)..(18): Any L- or D-natural or non-natural amino acid, and this range may encompass 1 or 4 residues; see specification as filed for detailed description of substitutions, R-groups and preferred embodiments
  c-term may be amidated
SLAXDTPTXXXSYTXXXXEEWVKYVDDLELSA

SEQ ID NO: 803 - protein, 32 aa, Artificial Sequence
  Description of Artificial Sequence: Synthetic peptide
  MOD_RES (5)..(5): Any L- or D-natural amino acid and any non-natural amino acid; see specification as filed for detailed description of substitutions, R-groups and preferred embodiments
  MOD_RES (9)..(11): Any L- or D-natural amino acid and any non-natural amino acid; see specification as filed for detailed description of substitutions, R-groups and preferred embodiments
  MOD_RES (15)..(18): Any L- or D-natural or non-natural amino acid, and this range may encompass 1 or 4 residues; see specification as filed for detailed description of substitutions, R-groups and preferred embodiments
  c-term may be amidated
SLAAXTPTXXXSYTXXXXEEWVKYVDDLELSA

SEQ ID NO: 804 - protein, 32 aa, Artificial Sequence
  Description of Artificial Sequence: Synthetic peptide
  MOD_RES (6)..(6): Any L- or D-natural amino acid and any non-natural amino acid; see specification as filed for detailed description of substitutions, R-groups and preferred embodiments
  MOD_RES (9)..(11): Any L- or D-natural amino acid and any non-natural amino acid; see specification as filed for detailed description of substitutions, R-groups and preferred embodiments
  MOD_RES (15)..(18): Any L- or D-natural or non-natural amino acid, and this range may encompass 1 or 4 residues; see specification as filed for detailed description of substitutions, R-groups and preferred embodiments
  c-term may be amidated
SLAADXPTXXXSYTXXXXEEWVKYVDDLELSA

SEQ ID NO: 805 - protein, 32 aa, Artificial Sequence
  Description of Artificial Sequence: Synthetic peptide
  MOD_RES (7)..(7): Any L- or D-natural amino acid and any non-natural amino acid; see specification as filed for detailed description of substitutions, R-groups and preferred embodiments
  MOD_RES (9)..(11): Any L- or D-natural amino acid and any non-natural amino acid; see specification as filed for detailed description of substitutions, R-groups and preferred embodiments
  MOD_RES (15)..(18): Any L- or D-natural or non-natural amino acid, and this range may encompass 1 or 4 residues; see specification as filed for detailed description of substitutions, R-groups and preferred embodiments
  c-term may be amidated
SLAADTXTXXXSYTXXXXEEWVKYVDDLELSA

SEQ ID NO: 806 - protein, 32 aa, Artificial Sequence
  Description of Artificial Sequence: Synthetic peptide
  MOD_RES (8)..(11): Any L- or D-natural amino acid and any non-natural amino acid; see specification as filed for detailed description of substitutions, R-groups and preferred embodiments
  MOD_RES (15)..(18): Any L- or D-natural or non-natural amino acid, and this range may encompass 1 or 4 residues; see specification as filed for detailed description of substitutions, R-groups and preferred embodiments
  c-term may be amidated
SLAADTPXXXXSYTXXXXEEWVKYVDDLELSA

SEQ ID NO: 807 - protein, 32 aa, Artificial Sequence
  Description of Artificial Sequence: Synthetic peptide
  MOD_RES (9)..(10): Any L- or D-natural amino acid and any non-natural amino acid; see specification as filed for detailed description of substitutions, R-groups and preferred embodiments
  MOD_RES (12)..(12): Any L- or D-natural amino acid and any non-natural amino acid; see specification as filed for detailed description of substitutions, R-groups and preferred embodiments
  MOD_RES (15)..(18): Any L- or D-natural or non-natural amino acid, and this range may encompass 1 or 4 residues; see specification as filed for detailed description of substitutions, R-groups and preferred embodiments
  c-term may be amidated
SLAADTPTXXFXYTXXXXEEWVKYVDDLELSA

SEQ ID NO: 808 - protein, 32 aa, Artificial Sequence
  Description of Artificial Sequence: Synthetic peptide
  MOD_RES (1)..(1): Any L- or D-natural amino acid and any non-natural amino acid; see specification as filed for detailed description of substitutions, R-groups and preferred embodiments
  MOD_RES (9)..(10): Any L- or D-natural amino acid and any non-natural amino acid; see specification as filed for detailed description of substitutions, R-groups and preferred embodiments
  MOD_RES (12)..(12): Any L- or D-natural amino acid and any non-natural amino acid; see specification as filed for detailed description of substitutions, R-groups and preferred embodiments
  MOD_RES (15)..(18): Any L- or D-natural or non-natural amino acid, and this range may encompass 1 or 4 residues; see specification as filed for detailed description of substitutions, R-groups and preferred embodiments
  c-term may be amidated
XLAADTPTXXFXYTXXXXEEWVKYVDDLELSA

SEQ ID NO: 809 - protein, 32 aa, Artificial Sequence
  Description of Artificial Sequence: Synthetic peptide
  MOD_RES (2)..(2): Any L- or D-natural amino acid and any non-natural amino acid; see specification as filed for detailed description of substitutions, R-groups and preferred embodiments
  MOD_RES (9)..(10): Any L- or D-natural amino acid and any non-natural amino acid; see specification as filed for detailed description of substitutions, R-groups and preferred embodiments
  MOD_RES (12)..(12): Any L- or D-natural amino acid and any non-natural amino acid; see specification as filed for detailed description of substitutions, R-groups and preferred embodiments
  MOD_RES (15)..(18): Any L- or D-natural or non-natural amino acid, and this range may encompass 1 or 4 residues; see specification as filed for detailed description of substitutions, R-groups and preferred embodiments
  c-term may be amidated
SXAADTPTXXFXYTXXXXEEWVKYVDDLELSA

SEQ ID NO: 810 - protein, 32 aa, Artificial Sequence
  Description of Artificial Sequence: Synthetic peptide
  MOD_RES (3)..(3): Any L- or D-natural amino acid and any non-natural amino acid; see specification as filed for detailed description of substitutions, R-groups and preferred embodiments
  MOD_RES (9)..(10): Any L- or D-natural amino acid and any non-natural amino acid; see specification as filed for detailed description of substitutions, R-groups and preferred embodiments
  MOD_RES (12)..(12): Any L- or D-natural amino acid and any non-natural amino acid; see specification as filed for detailed description of substitutions, R-groups and preferred embodiments
  MOD_RES (15)..(18): Any L- or D-natural or non-natural amino acid, and this range may encompass 1 or 4 residues; see specification as filed for detailed description of substitutions, R-groups and preferred embodiments
  c-term may be amidated
SLXADTPTXXFXYTXXXXEEWVKYVDDLELSA

SEQ ID NO: 811 - protein, 32 aa, Artificial Sequence
  Description of Artificial Sequence: Synthetic peptide
  MOD_RES (4)..(4): Any L- or D-natural amino acid and any non-natural amino acid; see specification as filed for detailed description of substitutions, R-groups and preferred embodiments
  MOD_RES (9)..(10): Any L- or D-natural amino acid and any non-natural amino acid; see specification as filed for detailed description of substitutions, R-groups and preferred embodiments
  MOD_RES (12)..(12): Any L- or D-natural amino acid and any non-natural amino acid; see specification as filed for detailed description of substitutions, R-groups and preferred embodiments
  MOD_RES (15)..(18): Any L- or D-natural or non-natural amino acid, and this range may encompass 1 or 4 residues; see specification as filed for detailed description of substitutions, R-groups and preferred embodiments
  c-term may be amidated
SLAXDTPTXXFXYTXXXXEEWVKYVDDLELSA

SEQ ID NO: 812 - protein, 32 aa, Artificial Sequence
  Description of Artificial Sequence: Synthetic peptide
  MOD_RES (5)..(5): Any L- or D-natural amino acid and any non-natural amino acid; see specification as filed for detailed description of substitutions, R-groups and preferred embodiments
  MOD_RES (9)..(10): Any L- or D-natural amino acid and any non-natural amino acid; see specification as filed for detailed description of substitutions, R-groups and preferred embodiments
  MOD_RES (12)..(12): Any L- or D-natural amino acid and any non-natural amino acid; see specification as filed for detailed description of substitutions, R-groups and preferred embodiments
  MOD_RES (15)..(18): Any L- or D-natural or non-natural amino acid, and this range may encompass 1 or 4 residues; see specification as filed for detailed description of substitutions, R-groups and preferred embodiments
  c-term may be amidated
SLAAXTPTXXFXYTXXXXEEWVKYVDDLELSA

SEQ ID NO: 813 - protein, 32 aa, Artificial Sequence
  Description of Artificial Sequence: Synthetic peptide
  MOD_RES (6)..(6): Any L- or D-natural amino acid and any non-natural amino acid; see specification as filed for detailed description of substitutions, R-groups and preferred embodiments
  MOD_RES (9)..(10): Any L- or D-natural amino acid and any non-natural amino acid; see specification as filed for detailed description of substitutions, R-groups and preferred embodiments
  MOD_RES (12)..(12): Any L- or D-natural amino acid and any non-natural amino acid; see specification as filed for detailed description of substitutions, R-groups and preferred embodiments
  MOD_RES (15)..(18): Any L- or D-natural or non-natural amino acid, and this range may encompass 1 or 4 residues; see specification as filed for detailed description of substitutions, R-groups and preferred embodiments
  c-term may be amidated
SLAADXPTXXFXYTXXXXEEWVKYVDDLELSA

SEQ ID NO: 814 - protein, 32 aa, Artificial Sequence
  Description of Artificial Sequence: Synthetic peptide
  MOD_RES (7)..(7): Any L- or D-natural amino acid and any non-natural amino acid; see specification as filed for detailed description of substitutions, R-groups and preferred embodiments
  MOD_RES (9)..(10): Any L- or D-natural amino acid and any non-natural amino acid; see specification as filed for detailed description of substitutions, R-groups and preferred embodiments
  MOD_RES (12)..(12): Any L- or D-natural amino acid and any non-natural amino acid; see specification as filed for detailed description of substitutions, R-groups and preferred embodiments
  MOD_RES (15)..(18): Any L- or D-natural or non-natural amino acid, and this range may encompass 1 or 4 residues; see specification as filed for detailed description of substitutions, R-groups and preferred embodiments
  c-term may be amidated
SLAADTXTXXFXYTXXXXEEWVKYVDDLELSA

SEQ ID NO: 815 - protein, 32 aa, Artificial Sequence
  Description of Artificial Sequence: Synthetic peptide
  MOD_RES (8)..(10): Any L- or D-natural amino acid and any non-natural amino acid; see specification as filed for detailed description of substitutions, R-groups and preferred embodiments
  MOD_RES (12)..(12): Any L- or D-natural amino acid and any non-natural amino acid; see specification as filed for detailed description of substitutions, R-groups and preferred embodiments
  MOD_RES (15)..(18): Any L- or D-natural or non-natural amino acid, and this range may encompass 1 or 4 residues; see specification as filed for detailed description of substitutions, R-groups and preferred embodiments
  c-term may be amidated
SLAADTPXXXFXYTXXXXEEWVKYVDDLELSA

SEQ ID NO: 816 - protein, 32 aa, Artificial Sequence
  Description of Artificial Sequence: Synthetic peptide
  MOD_RES (9)..(10): Any L- or D-natural amino acid and any non-natural amino acid; see specification as filed for detailed description of substitutions, R-groups and preferred embodiments
  MOD_RES (13)..(13): Any L- or D-natural amino acid and any non-natural amino acid; see specification as filed for detailed description of substitutions, R-groups and preferred embodiments
  MOD_RES (15)..(18): Any L- or D-natural or non-natural amino acid, and this range may encompass 1 or 4 residues; see specification as filed for detailed description of substitutions, R-groups and preferred embodiments
  c-term may be amidated
SLAADTPTXXFSXTXXXXEEWVKYVDDLELSA

SEQ ID NO: 817 - protein, 32 aa, Artificial Sequence
  Description of Artificial Sequence: Synthetic peptide
  MOD_RES (1)..(1): Any L- or D-natural amino acid and any non-natural amino acid; see specification as filed for detailed description of substitutions, R-groups and preferred embodiments
  MOD_RES (9)..(10): Any L- or D-natural amino acid and any non-natural amino acid; see specification as filed for detailed description of substitutions, R-groups and preferred embodiments
  MOD_RES (13)..(13): Any L- or D-natural amino acid and any non-natural amino acid; see specification as filed for detailed description of substitutions, R-groups and preferred embodiments
  MOD_RES (15)..(18): Any L- or D-natural or non-natural amino acid, and this range may encompass 1 or 4 residues; see specification as filed for detailed description of substitutions, R-groups and preferred embodiments
  c-term may be amidated
XLAADTPTXXFSXTXXXXEEWVKYVDDLELSA

SEQ ID NO: 818 - protein, 32 aa, Artificial Sequence
  Description of Artificial Sequence: Synthetic peptide
  MOD_RES (2)..(2): Any L- or D-natural amino acid and any non-natural amino acid; see specification as filed for detailed description of substitutions, R-groups and preferred embodiments
  MOD_RES (9)..(10): Any L- or D-natural amino acid and any non-natural amino acid; see specification as filed for detailed description of substitutions, R-groups and preferred embodiments
  MOD_RES (13)..(13): Any L- or D-natural amino acid and any non-natural amino acid; see specification as filed for detailed description of substitutions, R-groups and preferred embodiments
  MOD_RES (15)..(18): Any L- or D-natural or non-natural amino acid, and this range may encompass 1 or 4 residues; see specification as filed for detailed description of substitutions, R-groups and preferred embodiments
  c-term may be amidated
SXAADTPTXXFSXTXXXXEEWVKYVDDLELSA

SEQ ID NO: 819 - protein, 32 aa, Artificial Sequence
  Description of Artificial Sequence: Synthetic peptide
  MOD_RES (3)..(3): Any L- or D-natural amino acid and any non-natural amino acid; see specification as filed for detailed description of substitutions, R-groups and preferred embodiments
  MOD_RES (9)..(10): Any L- or D-natural amino acid and any non-natural amino acid; see specification as filed for detailed description of substitutions, R-groups and preferred embodiments
  MOD_RES (13)..(13): Any L- or D-natural amino acid and any non-natural amino acid; see specification as filed for detailed description of substitutions, R-groups and preferred embodiments
  MOD_RES (15)..(18): Any L- or D-natural or non-natural amino acid, and this range may encompass 1 or 4 residues; see specification as filed for detailed description of substitutions, R-groups and preferred embodiments
  c-term may be amidated
SLXADTPTXXFSXTXXXXEEWVKYVDDLELSA

SEQ ID NO: 820 - protein, 32 aa, Artificial Sequence
  Description of Artificial Sequence: Synthetic peptide
  MOD_RES (4)..(4): Any L- or D-natural amino acid and any non-natural amino acid; see specification as filed for detailed description of substitutions, R-groups and preferred embodiments
  MOD_RES (9)..(10): Any L- or D-natural amino acid and any non-natural amino acid; see specification as filed for detailed description of substitutions, R-groups and preferred embodiments
  MOD_RES (13)..(13): Any L- or D-natural amino acid and any non-natural amino acid; see specification as filed for detailed description of substitutions, R-groups and preferred embodiments
  MOD_RES (15)..(18): Any L- or D-natural or non-natural amino acid, and this range may encompass 1 or 4 residues; see specification as filed for detailed description of substitutions, R-groups and preferred embodiments
  c-term may be amidated
SLAXDTPTXXFSXTXXXXEEWVKYVDDLELSA

SEQ ID NO: 821 - protein, 32 aa, Artificial Sequence
  Description of Artificial Sequence: Synthetic peptide
  MOD_RES (5)..(5): Any L- or D-natural amino acid and any non-natural amino acid; see specification as filed for detailed description of substitutions, R-groups and preferred embodiments
  MOD_RES (9)..(10): Any L- or D-natural amino acid and any non-natural amino acid; see specification as filed for detailed description of substitutions, R-groups and preferred embodiments
  MOD_RES (13)..(13): Any L- or D-natural amino acid and any non-natural amino acid; see specification as filed for detailed description of substitutions, R-groups and preferred embodiments
  MOD_RES (15)..(18): Any L- or D-natural or non-natural amino acid, and this range may encompass 1 or 4 residues; see specification as filed for detailed description of substitutions, R-groups and preferred embodiments
  c-term may be amidated
SLAAXTPTXXFSXTXXXXEEWVKYVDDLELSA

SEQ ID NO: 822 - protein, 32 aa, Artificial Sequence
  Description of Artificial Sequence: Synthetic peptide
  MOD_RES (6)..(6): Any L- or D-natural amino acid and any non-natural amino acid; see specification as filed for detailed description of substitutions, R-groups and preferred embodiments
  MOD_RES (9)..(10): Any L- or D-natural amino acid and any non-natural amino acid; see specification as filed for detailed description of substitutions, R-groups and preferred embodiments
  MOD_RES (13)..(13): Any L- or D-natural amino acid and any non-natural amino acid; see specification as filed for detailed description of substitutions, R-groups and preferred embodiments
  MOD_RES (15)..(18): Any L- or D-natural or non-natural amino acid, and this range may encompass 1 or 4 residues; see specification as filed for detailed description of substitutions, R-groups and preferred embodiments
  c-term may be amidated
SLAADXPTXXFSXTXXXXEEWVKYVDDLELSA

SEQ ID NO: 823 - protein, 32 aa, Artificial Sequence
  Description of Artificial Sequence: Synthetic peptide
  MOD_RES (7)..(7): Any L- or D-natural amino acid and any non-natural amino acid; see specification as filed for detailed description of substitutions, R-groups and preferred embodiments
  MOD_RES (9)..(10): Any L- or D-natural amino acid and any non-natural amino acid; see specification as filed for detailed description of substitutions, R-groups and preferred embodiments
  MOD_RES (13)..(13): Any L- or D-natural amino acid and any non-natural amino acid; see specification as filed for detailed description of substitutions, R-groups and preferred embodiments
  MOD_RES (15)..(18): Any L- or D-natural or non-natural amino acid, and this range may encompass 1 or 4 residues; see specification as filed for detailed description of substitutions, R-groups and preferred embodiments
  c-term may be amidated
SLAADTXTXXFSXTXXXXEEWVKYVDDLELSA

SEQ ID NO: 824 - protein, 32 aa, Artificial Sequence
  Description of Artificial Sequence: Synthetic peptide
  MOD_RES (8)..(10): Any L- or D-natural amino acid and any non-natural amino acid; see specification as filed for detailed description of substitutions, R-groups and preferred embodiments
  MOD_RES (13)..(13): Any L- or D-natural amino acid and any non-natural amino acid; see specification as filed for detailed description of substitutions, R-groups and preferred embodiments
  MOD_RES (15)..(18): Any L- or D-natural or non-natural amino acid, and this range may encompass 1 or 4 residues; see specification as filed for detailed description of substitutions, R-groups and preferred embodiments
  c-term may be amidated
SLAADTPXXXFSXTXXXXEEWVKYVDDLELSA

SEQ ID NO: 825 - protein, 32 aa, Artificial Sequence
  Description of Artificial Sequence: Synthetic peptide
  MOD_RES (9)..(10): Any L- or D-natural amino acid and any non-natural amino acid; see specification as filed for detailed description of substitutions, R-groups and preferred embodiments
  MOD_RES (14)..(14): Any L- or D-natural amino acid and any non-natural amino acid; see specification as filed for detailed description of substitutions, R-groups and preferred embodiments
  MOD_RES (15)..(18): Any L- or D-natural or non-natural amino acid, and this range may encompass 1 or 4 residues; see specification as filed for detailed description of substitutions, R-groups and preferred embodiments
  c-term may be amidated
SLAADTPTXXFSYXXXXXEEWVKYVDDLELSA

SEQ ID NO: 826 - protein, 32 aa, Artificial Sequence
  Description of Artificial Sequence: Synthetic peptide
  MOD_RES (1)..(1): Any L- or D-natural amino acid and any non-natural amino acid; see specification as filed for detailed description of substitutions, R-groups and preferred embodiments
  MOD_RES (9)..(10): Any L- or D-natural amino acid and any non-natural amino acid; see specification as filed for detailed description of substitutions, R-groups and preferred embodiments
  MOD_RES (14)..(14): Any L- or D-natural amino acid and any non-natural amino acid; see specification as filed for detailed description of substitutions, R-groups and preferred embodiments
  MOD_RES (15)..(18): Any L- or D-natural or non-natural amino acid, and this range may encompass 1 or 4 residues; see specification as filed for detailed description of substitutions, R-groups and preferred embodiments
  c-term may be amidated
XLAADTPTXXFSYXXXXXEEWVKYVDDLELSA

SEQ ID NO: 827 - protein, 32 aa, Artificial Sequence
  Description of Artificial Sequence: Synthetic peptide
  MOD_RES (2)..(2): Any L- or D-natural amino acid and any non-natural amino acid; see specification as filed for detailed description of substitutions, R-groups and preferred embodiments
  MOD_RES (9)..(10): Any L- or D-natural amino acid and any non-natural amino acid; see specification as filed for detailed description of substitutions, R-groups and preferred embodiments
  MOD_RES (14)..(14): Any L- or D-natural amino acid and any non-natural amino acid; see specification as filed for detailed description of substitutions, R-groups and preferred embodiments
  MOD_RES (15)..(18): Any L- or D-natural or non-natural amino acid, and this range may encompass 1 or 4 residues; see specification as filed for detailed description of substitutions, R-groups and preferred embodiments
  c-term may be amidated
SXAADTPTXXFSYXXXXXEEWVKYVDDLELSA

SEQ ID NO: 828 - protein, 32 aa, Artificial Sequence
  Description of Artificial Sequence: Synthetic peptide
  MOD_RES (3)..(3): Any L- or D-natural amino acid and any non-natural amino acid; see specification as filed for detailed description of substitutions, R-groups and preferred embodiments
  MOD_RES (9)..(10): Any L- or D-natural amino acid and any non-natural amino acid; see specification as filed for detailed description of substitutions, R-groups and preferred embodiments
  MOD_RES (14)..(14): Any L- or D-natural amino acid and any non-natural amino acid; see specification as filed for detailed description of substitutions, R-groups and preferred embodiments
  MOD_RES (15)..(18): Any L- or D-natural or non-natural amino acid, and this range may encompass 1 or 4 residues; see specification as filed for detailed description of substitutions, R-groups and preferred embodiments
  c-term may be amidated
SLXADTPTXXFSYXXXXXEEWVKYVDDLELSA

SEQ ID NO: 829 - protein, 32 aa, Artificial Sequence
  Description of Artificial Sequence: Synthetic peptide
  MOD_RES (4)..(4): Any L- or D-natural amino acid and any non-natural amino acid; see specification as filed for detailed description of substitutions, R-groups and preferred embodiments
  MOD_RES (9)..(10): Any L- or D-natural amino acid and any non-natural amino acid; see specification as filed for detailed description of substitutions, R-groups and preferred embodiments
  MOD_RES (14)..(14): Any L- or D-natural amino acid and any non-natural amino acid; see specification as filed for detailed description of substitutions, R-groups and preferred embodiments
  MOD_RES (15)..(18): Any L- or D-natural or non-natural amino acid, and this range may encompass 1 or 4 residues; see specification as filed for detailed description of substitutions, R-groups and preferred embodiments
  c-term may be amidated
SLAXDTPTXXFSYXXXXXEEWVKYVDDLELSA

SEQ ID NO: 830 - protein, 32 aa, Artificial Sequence
  Description of Artificial Sequence: Synthetic peptide
  MOD_RES (5)..(5): Any L- or D-natural amino acid and any non-natural amino acid; see specification as filed for detailed description of substitutions, R-groups and preferred embodiments
  MOD_RES (9)..(10): Any L- or D-natural amino acid and any non-natural amino acid; see specification as filed for detailed description of substitutions, R-groups and preferred embodiments
  MOD_RES (14)..(14): Any L- or D-natural amino acid and any non-natural amino acid; see specification as filed for detailed description of substitutions, R-groups and preferred embodiments
  MOD_RES (15)..(18): Any L- or D-natural or non-natural amino acid, and this range may encompass 1 or 4 residues; see specification as filed for detailed description of substitutions, R-groups and preferred embodiments
  c-term may be amidated
SLAAXTPTXXFSYXXXXXEEWVKYVDDLELSA

SEQ ID NO: 831 - protein, 32 aa, Artificial Sequence
  Description of Artificial Sequence: Synthetic peptide
  MOD_RES (6)..(6): Any L- or D-natural amino acid and any non-natural amino acid; see specification as filed for detailed description of substitutions, R-groups and preferred embodiments
  MOD_RES (9)..(10): Any L- or D-natural amino acid and any non-natural amino acid; see specification as filed for detailed description of substitutions, R-groups and preferred embodiments
  MOD_RES (14)..(14): Any L- or D-natural amino acid and any non-natural amino acid; see specification as filed for detailed description of substitutions, R-groups and preferred embodiments
  MOD_RES (15)..(18): Any L- or D-natural or non-natural amino acid, and this range may encompass 1 or 4 residues; see specification as filed for detailed description of substitutions, R-groups and preferred embodiments
  c-term may be amidated
SLAADXPTXXFSYXXXXXEEWVKYVDDLELSA

SEQ ID NO: 832 - protein, 32 aa, Artificial Sequence
  Description of Artificial Sequence: Synthetic peptide
  MOD_RES (7)..(7): Any L- or D-natural amino acid and any non-natural amino acid; see specification as filed for detailed description of substitutions, R-groups and preferred embodiments
  MOD_RES (9)..(10): Any L- or D-natural amino acid and any non-natural amino acid; see specification as filed for detailed description of substitutions, R-groups and preferred embodiments
  MOD_RES (14)..(14): Any L- or D-natural amino acid and any non-natural amino acid; see specification as filed for detailed description of substitutions, R-groups and preferred embodiments
  MOD_RES (15)..(18): Any L- or D-natural or non-natural amino acid, and this range may encompass 1 or 4 residues; see specification as filed for detailed description of substitutions, R-groups and preferred embodiments
  c-term may be amidated
SLAADTXTXXFSYXXXXXEEWVKYVDDLELSA

SEQ ID NO: 833 - protein, 32 aa, Artificial Sequence
  Description of Artificial Sequence: Synthetic peptide
  MOD_RES (8)..(10): Any L- or D-natural amino acid and any non-natural amino acid; see specification as filed for detailed description of substitutions, R-groups and preferred embodiments
  MOD_RES (14)..(14): Any L- or D-natural amino acid and any non-natural amino acid; see specification as filed for detailed description of substitutions, R-groups and preferred embodiments
  MOD_RES (15)..(18): Any L- or D-natural or non-natural amino acid, and this range may encompass 1 or 4 residues; see specification as filed for detailed description of substitutions, R-groups and preferred embodiments
  c-term may be amidated
SLAADTPXXXFSYXXXXXEEWVKYVDDLELSA

SEQ ID NO: 834 - protein, 23 aa, Artificial Sequence
  Description of Artificial Sequence: Synthetic peptide
  c-term may be amidated
ACFSYTSRQIPQNADYFETSSQC

SEQ ID NO: 835 - protein, 23 aa, Artificial Sequence
  Description of Artificial Sequence: Synthetic peptide
  c-term may be amidated
AKFSYTSRQIPQNADYFETSSQE

SEQ ID NO: 836 - protein, 32 aa, Artificial Sequence; identical to SEQ ID NO: 788
  Description of Artificial Sequence: Synthetic peptide
  MOD_RES (15)..(18): Any L- or D-natural or non-natural amino acid, and this range may encompass 1 or 4 residues; see specification as filed for detailed description of substitutions, R-groups and preferred embodiments
  c-term may be amidated

SEQ ID NO: 837 - protein, 32 aa, Artificial Sequence; identical to SEQ ID NO: 789
  Description of Artificial Sequence: Synthetic peptide
  MOD_RES (9)..(10): Any L- or D-natural amino acid and any non-natural amino acid; see specification as filed for detailed description of substitutions, R-groups and preferred embodiments
  MOD_RES (15)..(18): Any L- or D-natural or non-natural amino acid, and this range may encompass 1 or 4 residues; see specification as filed for detailed description of substitutions, R-groups and preferred embodiments
  c-term may be amidated

SEQ ID NO: 838 - protein, 32 aa, Artificial Sequence; identical to SEQ ID NO: 790
  Description of Artificial Sequence: Synthetic peptide
  MOD_RES (1)..(1): Any L- or D-natural amino acid and any non-natural amino acid; see specification as filed for detailed description of substitutions, R-groups and preferred embodiments
  MOD_RES (9)..(10): Any L- or D-natural amino acid and any non-natural amino acid; see specification as filed for detailed description of substitutions, R-groups and preferred embodiments
  MOD_RES (15)..(18): Any L- or D-natural or non-natural amino acid, and this range may encompass 1 or 4 residues; see specification as filed for detailed description of substitutions, R-groups and preferred embodiments
  c-term may be amidated

SEQ ID NO: 839 - protein, 32 aa, Artificial Sequence; identical to SEQ ID NO: 791
  Description of Artificial Sequence: Synthetic peptide
  MOD_RES (2)..(2): Any L- or D-natural amino acid and any non-natural amino acid; see specification as filed for detailed description of substitutions, R-groups and preferred embodiments
  MOD_RES (9)..(10): Any L- or D-natural amino acid and any non-natural amino acid; see specification as filed for detailed description of substitutions, R-groups and preferred embodiments
  MOD_RES (15)..(18): Any L- or D-natural or non-natural amino acid, and this range may encompass 1 or 4 residues; see specification as filed for detailed description of substitutions, R-groups and preferred embodiments
  c-term may be amidated

SEQ ID NO: 840 - protein, 32 aa, Artificial Sequence; identical to SEQ ID NO: 792
  Description of Artificial Sequence: Synthetic peptide
  MOD_RES (3)..(3): Any L- or D-natural amino acid and any non-natural amino acid; see specification as filed for detailed description of substitutions, R-groups and preferred embodiments
  MOD_RES (9)..(10): Any L- or D-natural amino acid and any non-natural amino acid; see specification as filed for detailed description of substitutions, R-groups and preferred embodiments
  MOD_RES (15)..(18): Any L- or D-natural or non-natural amino acid, and this range may encompass 1 or 4 residues; see specification as filed for detailed description of substitutions, R-groups and preferred embodiments
  c-term may be amidated

SEQ ID NO: 841 - protein, 32 aa, Artificial Sequence; identical to SEQ ID NO: 793
  Description of Artificial Sequence: Synthetic peptide
  MOD_RES (4)..(4): Any L- or D-natural amino acid and any non-natural amino acid; see specification as filed for detailed description of substitutions, R-groups and preferred embodiments
  MOD_RES (9)..(10): Any L- or D-natural amino acid and any non-natural amino acid; see specification as filed for detailed description of substitutions, R-groups and preferred embodiments
  MOD_RES (15)..(18): Any L- or D-natural or non-natural amino acid, and this range may encompass 1 or 4 residues; see specification as filed for detailed description of substitutions, R-groups and preferred embodiments
  c-term may be amidated

SEQ ID NO: 842 - protein, 32 aa, Artificial Sequence; identical to SEQ ID NO: 794
  Description of Artificial Sequence: Synthetic peptide
  MOD_RES (5)..(5): Any L- or D-natural amino acid and any non-natural amino acid; see specification as filed for detailed description of substitutions, R-groups and preferred embodiments
  MOD_RES (9)..(10): Any L- or D-natural amino acid and any non-natural amino acid; see specification as filed for detailed description of substitutions, R-groups and preferred embodiments
  MOD_RES (15)..(18): Any L- or D-natural or non-natural amino acid, and this range may encompass 1 or 4 residues; see specification as filed for detailed description of substitutions, R-groups and preferred embodiments
  c-term may be amidated

SEQ ID NO: 843 - protein, 32 aa, Artificial Sequence; identical to SEQ ID NO: 795
  Description of Artificial Sequence: Synthetic peptide
  MOD_RES (6)..(6): Any L- or D-natural amino acid and any non-natural amino acid; see specification as filed for detailed description of substitutions, R-groups and preferred embodiments
  MOD_RES (9)..(10): Any L- or D-natural amino acid and any non-natural amino acid; see specification as filed for detailed description of substitutions, R-groups and preferred embodiments
  MOD_RES (15)..(18): Any L- or D-natural or non-natural amino acid, and this range may encompass 1 or 4 residues; see specification as filed for detailed description of substitutions, R-groups and preferred embodiments
  c-term may be amidated

SEQ ID NO: 844 - protein, 32 aa, Artificial Sequence; identical to SEQ ID NO: 796
  Description of Artificial Sequence: Synthetic peptide
  MOD_RES (7)..(7): Any L- or D-natural amino acid and any non-natural amino acid; see specification as filed for detailed description of substitutions, R-groups and preferred embodiments
  MOD_RES (9)..(10): Any L- or D-natural amino acid and any non-natural amino acid; see specification as filed for detailed description of substitutions, R-groups and preferred embodiments
  MOD_RES (15)..(18): Any L- or D-natural or non-natural amino acid, and this range may encompass 1 or 4 residues; see specification as filed for detailed description of substitutions, R-groups and preferred embodiments
  c-term may be amidated

SEQ ID NO: 845 - protein, 32 aa, Artificial Sequence; identical to SEQ ID NO: 797
  Description of Artificial Sequence: Synthetic peptide
  MOD_RES (8)..(10): Any L- or D-natural amino acid and any non-natural amino acid; see specification as filed for detailed description of substitutions, R-groups and preferred embodiments
  MOD_RES (15)..(18): Any L- or D-natural or non-natural amino acid, and this range may encompass 1 or 4 residues; see specification as filed for detailed description of substitutions, R-groups and preferred embodiments
  c-term may be amidated

SEQ ID NO: 846 - protein, 32 aa, Artificial Sequence; identical to SEQ ID NO: 798
  Description of Artificial Sequence: Synthetic peptide
  MOD_RES (9)..(11): Any L- or D-natural amino acid and any non-natural amino acid; see specification as filed for detailed description of substitutions, R-groups and preferred embodiments
  MOD_RES (15)..(18): Any L- or D-natural or non-natural amino acid, and this range may encompass 1 or 4 residues; see specification as filed for detailed description of substitutions, R-groups and preferred embodiments
  c-term may be amidated

SEQ ID NO: 847 - protein, 32 aa, Artificial Sequence; identical to SEQ ID NO: 799
  Description of Artificial Sequence: Synthetic peptide
  MOD_RES (1)..(1): Any L- or D-natural amino acid and any non-natural amino acid; see specification as filed for detailed description of substitutions, R-groups and preferred embodiments
  MOD_RES (9)..(11): Any L- or D-natural amino acid and any non-natural amino acid; see specification as filed for detailed description of substitutions, R-groups and preferred embodiments
  MOD_RES (15)..(18): Any L- or D-natural or non-natural amino acid, and this range may encompass 1 or 4 residues; see specification as filed for detailed description of substitutions, R-groups and preferred embodiments
  c-term may be amidated

SEQ ID NO: 848 - protein, 32 aa, Artificial Sequence; identical to SEQ ID NO: 800
  Description of Artificial Sequence: Synthetic peptide
  MOD_RES (2)..(2): Any L- or D-natural amino acid and any non-natural amino acid; see specification as filed for detailed description of substitutions, R-groups and preferred embodiments
  MOD_RES (9)..(11): Any L- or D-natural amino acid and any non-natural amino acid; see specification as filed for detailed description of substitutions, R-groups and preferred embodiments
  MOD_RES (15)..(18): Any L- or D-natural or non-natural amino acid, and this range may encompass 1 or 4 residues; see specification as filed for detailed description of substitutions, R-groups and preferred embodiments
  c-term may be amidated

SEQ ID NO: 849 - protein, 32 aa, Artificial Sequence; identical to SEQ ID NO: 801
  Description of Artificial Sequence: Synthetic peptide
  MOD_RES (3)..(3): Any L- or D-natural amino acid and any non-natural amino acid; see specification as filed for detailed description of substitutions, R-groups and preferred embodiments
  MOD_RES (9)..(11): Any L- or D-natural amino acid and any non-natural amino acid; see specification as filed for detailed description of substitutions, R-groups and preferred embodiments
  MOD_RES (15)..(18): Any L- or D-natural or non-natural amino acid, and this range may encompass 1 or 4 residues; see specification as filed for detailed description of substitutions, R-groups and preferred embodiments
  c-term may be amidated

SEQ ID NO: 850 - protein, 32 aa, Artificial Sequence; identical to SEQ ID NO: 802
  Description of Artificial Sequence: Synthetic peptide
  MOD_RES (4)..(4): Any L- or D-natural amino acid and any non-natural amino acid; see specification as filed for detailed description of substitutions, R-groups and preferred embodiments
  MOD_RES (9)..(11): Any L- or D-natural amino acid and any non-natural amino acid; see specification as filed for detailed description of substitutions, R-groups and preferred embodiments
  MOD_RES (15)..(18): Any L- or D-natural or non-natural amino acid, and this range may encompass 1 or 4 residues; see specification as filed for detailed description of substitutions, R-groups and preferred embodiments
  c-term may be amidated

SEQ ID NO: 851 - protein, 32 aa, Artificial Sequence; identical to SEQ ID NO: 803
  Description of Artificial Sequence: Synthetic peptide
  MOD_RES (5)..(5): Any L- or D-natural amino acid and any non-natural amino acid; see specification as filed for detailed description of substitutions, R-groups and preferred embodiments
  MOD_RES (9)..(11): Any L- or D-natural amino acid and any non-natural amino acid; see specification as filed for detailed description of substitutions, R-groups and preferred embodiments
  MOD_RES (15)..(18): Any L- or D-natural or non-natural amino acid, and this range may encompass 1 or 4 residues; see specification as filed for detailed description of substitutions, R-groups and preferred embodiments
  c-term may be amidated

SEQ ID NO: 852 - protein, 32 aa, Artificial Sequence; identical to SEQ ID NO: 804
  Description of Artificial Sequence: Synthetic peptide
  MOD_RES (6)..(6): Any L- or D-natural amino acid and any non-natural amino acid; see specification as filed for detailed description of substitutions, R-groups and preferred embodiments
  MOD_RES (9)..(11): Any L- or D-natural amino acid and any non-natural amino acid; see specification as filed for detailed description of substitutions, R-groups and preferred embodiments
  MOD_RES (15)..(18): Any L- or D-natural or non-natural amino acid, and this range may encompass 1 or 4 residues; see specification as filed for detailed description of substitutions, R-groups and preferred embodiments
  c-term may be amidated

SEQ ID NO: 853 - protein, 32 aa, Artificial Sequence; identical to SEQ ID NO: 805
  Description of Artificial Sequence: Synthetic peptide
  MOD_RES (7)..(7): Any L- or D-natural amino acid and any non-natural amino acid; see specification as filed for detailed description of substitutions, R-groups and preferred embodiments
  MOD_RES (9)..(11): Any L- or D-natural amino acid and any non-natural amino acid; see specification as filed for detailed description of substitutions, R-groups and preferred embodiments
  MOD_RES (15)..(18): Any L- or D-natural or non-natural amino acid, and this range may encompass 1 or 4 residues; see specification as filed for detailed description of substitutions, R-groups and preferred embodiments
  c-term may be amidated

SEQ ID NO: 854 - protein, 32 aa, Artificial Sequence; identical to SEQ ID NO: 806
  Description of Artificial Sequence: Synthetic peptide
  MOD_RES (8)..(11): Any L- or D-natural amino acid and any non-natural amino acid; see specification as filed for detailed description of substitutions, R-groups and preferred embodiments
  MOD_RES (15)..(18): Any L- or D-natural or non-natural amino acid, and this range may encompass 1 or 4 residues; see specification as filed for detailed description of substitutions, R-groups and preferred embodiments
  c-term may be amidated

SEQ ID NO: 855 - protein, 32 aa, Artificial Sequence; identical to SEQ ID NO: 807
  Description of Artificial Sequence: Synthetic peptide
  MOD_RES (9)..(10): Any L- or D-natural amino acid and any non-natural amino acid; see specification as filed for detailed description of substitutions, R-groups and preferred embodiments
  MOD_RES (12)..(12): Any L- or D-natural amino acid and any non-natural amino acid; see specification as filed for detailed description of substitutions, R-groups and preferred embodiments
  MOD_RES (15)..(18): Any L- or D-natural or non-natural amino acid, and this range may encompass 1 or 4 residues; see specification as filed for detailed description of substitutions, R-groups and preferred embodiments
  c-term may be amidated

SEQ ID NO: 856 - protein, 32 aa, Artificial Sequence; identical to SEQ ID NO: 808
  Description of Artificial Sequence: Synthetic peptide
  MOD_RES (1)..(1): Any L- or D-natural amino acid and any non-natural amino acid; see specification as filed for detailed description of substitutions, R-groups and preferred embodiments
  MOD_RES (9)..(10): Any L- or D-natural amino acid and any non-natural amino acid; see specification as filed for detailed description of substitutions, R-groups and preferred embodiments
  MOD_RES (12)..(12): Any L- or D-natural amino acid and any non-natural amino acid; see specification as filed for detailed description of substitutions, R-groups and preferred embodiments
  MOD_RES (15)..(18): Any L- or D-natural or non-natural amino acid, and this range may encompass 1 or 4 residues; see specification as filed for detailed description of substitutions, R-groups and preferred embodiments
  c-term may be amidated

SEQ ID NO: 857 - protein, 32 aa, Artificial Sequence; identical to SEQ ID NO: 809
  Description of Artificial Sequence: Synthetic peptide
  MOD_RES (2)..(2): Any L- or D-natural amino acid and any non-natural amino acid; see specification as filed for detailed description of substitutions, R-groups and preferred embodiments
  MOD_RES (9)..(10): Any L- or D-natural amino acid and any non-natural amino acid; see specification as filed for detailed description of substitutions, R-groups and preferred embodiments
  MOD_RES (12)..(12): Any L- or D-natural amino acid and any non-natural amino acid; see specification as filed for detailed description of substitutions, R-groups and preferred embodiments
  MOD_RES (15)..(18): Any L- or D-natural or non-natural amino acid, and this range may encompass 1 or 4 residues; see specification as filed for detailed description of substitutions, R-groups and preferred embodiments
  c-term may be amidated

SEQ ID NO: 858 - protein, 32 aa, Artificial Sequence; identical to SEQ ID NO: 810
  Description of Artificial Sequence: Synthetic peptide
  MOD_RES (3)..(3): Any L- or D-natural amino acid and any non-natural amino acid; see specification as filed for detailed description of substitutions, R-groups and preferred embodiments
  MOD_RES (9)..(10): Any L- or D-natural amino acid and any non-natural amino acid; see specification as filed for detailed description of substitutions, R-groups and preferred embodiments
  MOD_RES (12)..(12): Any L- or D-natural amino acid and any non-natural amino acid; see specification as filed for detailed description of substitutions, R-groups and preferred embodiments
  MOD_RES (15)..(18): Any L- or D-natural or non-natural amino acid, and this range may encompass 1 or 4 residues; see specification as filed for detailed description of substitutions, R-groups and preferred embodiments
  c-term may be amidated

SEQ ID NO: 859 - protein, 32 aa, Artificial Sequence; identical to SEQ ID NO: 811
  Description of Artificial Sequence: Synthetic peptide
  MOD_RES (4)..(4): Any L- or D-natural amino acid and any non-natural amino acid; see specification as filed for detailed description of substitutions, R-groups and preferred embodiments
  MOD_RES (9)..(10): Any L- or D-natural amino acid and any non-natural amino acid; see specification as filed for detailed description of substitutions, R-groups and preferred embodiments
  MOD_RES (12)..(12): Any L- or D-natural amino acid and any non-natural amino acid; see specification as filed for detailed description of substitutions, R-groups and preferred embodiments
  MOD_RES (15)..(18): Any L- or D-natural or non-natural amino acid, and this range may encompass 1 or 4 residues; see specification as filed for detailed description of substitutions, R-groups and preferred embodiments
  c-term may be amidated

SEQ ID NO: 860 - protein, 32 aa, Artificial Sequence; identical to SEQ ID NO: 812
  Description of Artificial Sequence: Synthetic peptide
  MOD_RES (5)..(5): Any L- or D-natural amino acid and any non-natural amino acid; see specification as filed for detailed description of substitutions, R-groups and preferred embodiments
  MOD_RES (9)..(10): Any L- or D-natural amino acid and any non-natural amino acid; see specification as filed for detailed description of substitutions, R-groups and preferred embodiments
  MOD_RES (12)..(12): Any L- or D-natural amino acid and any non-natural amino acid; see specification as filed for detailed description of substitutions, R-groups and preferred embodiments
  MOD_RES (15)..(18): Any L- or D-natural or non-natural amino acid, and this range may encompass 1 or 4 residues; see specification as filed for detailed description of substitutions, R-groups and preferred embodiments
  c-term may be amidated

SEQ ID NO: 861 - protein, 32 aa, Artificial Sequence; identical to SEQ ID NO: 813
  Description of Artificial Sequence: Synthetic peptide
  MOD_RES (6)..(6): Any L- or D-natural amino acid and any non-natural amino acid; see specification as filed for detailed description of substitutions, R-groups and preferred embodiments
  MOD_RES (9)..(10): Any L- or D-natural amino acid and any non-natural amino acid; see specification as filed for detailed description of substitutions, R-groups and preferred embodiments
  MOD_RES (12)..(12): Any L- or D-natural amino acid and any non-natural amino acid; see specification as filed for detailed description of substitutions, R-groups and preferred embodiments
  MOD_RES (15)..(18): Any L- or D-natural or non-natural amino acid, and this range may encompass 1 or 4 residues; see specification as filed for detailed description of substitutions, R-groups and preferred embodiments
  c-term may be amidated

SEQ ID NO: 862 - protein, 32 aa, Artificial Sequence; identical to SEQ ID NO: 814
  Description of Artificial Sequence: Synthetic peptide
  MOD_RES (7)..(7): Any L- or D-natural amino acid and any non-natural amino acid; see specification as filed for detailed description of substitutions, R-groups and preferred embodiments
  MOD_RES (9)..(10): Any L- or D-natural amino acid and any non-natural amino acid; see specification as filed for detailed description of substitutions, R-groups and preferred embodiments
  MOD_RES (12)..(12): Any L- or D-natural amino acid and any non-natural amino acid; see specification as filed for detailed description of substitutions, R-groups and preferred embodiments
  MOD_RES (15)..(18): Any L- or D-natural or non-natural amino acid, and this range may encompass 1 or 4 residues; see specification as filed for detailed description of substitutions, R-groups and preferred embodiments
  c-term may be amidated

SEQ ID NO: 863 - protein, 32 aa, Artificial Sequence; identical to SEQ ID NO: 815
  Description of Artificial Sequence: Synthetic peptide
  MOD_RES (8)..(10): Any L- or D-natural amino acid and any non-natural amino acid; see specification as filed for detailed description of substitutions, R-groups and preferred embodiments
  MOD_RES (12)..(12): Any L- or D-natural amino acid and any non-natural amino acid; see specification as filed for detailed description of substitutions, R-groups and preferred embodiments
  MOD_RES (15)..(18): Any L- or D-natural or non-natural amino acid, and this range may encompass 1 or 4 residues; see specification as filed for detailed description of substitutions, R-groups and preferred embodiments
  c-term may be amidated

SEQ ID NO: 864 - protein, 32 aa, Artificial Sequence; identical to SEQ ID NO: 816
  Description of Artificial Sequence: Synthetic peptide
  MOD_RES (9)..(10): Any L- or D-natural amino acid and any non-natural amino acid; see specification as filed for detailed description of substitutions, R-groups and preferred embodiments
  MOD_RES (13)..(13): Any L- or D-natural amino acid and any non-natural amino acid; see specification as filed for detailed description of substitutions, R-groups and preferred embodiments
  MOD_RES (15)..(18): Any L- or D-natural or non-natural amino acid, and this range may encompass 1 or 4 residues; see specification as filed for detailed description of substitutions, R-groups and preferred embodiments
  c-term may be amidated

SEQ ID NO: 865 - protein, 32 aa, Artificial Sequence; identical to SEQ ID NO: 817
  Description of Artificial Sequence: Synthetic peptide
  MOD_RES (1)..(1): Any L- or D-natural amino acid and any non-natural amino acid; see specification as filed for detailed description of substitutions, R-groups and preferred embodiments
  MOD_RES (9)..(10): Any L- or D-natural amino acid and any non-natural amino acid; see specification as filed for detailed description of substitutions, R-groups and preferred embodiments
  MOD_RES (13)..(13): Any L- or D-natural amino acid and any non-natural amino acid; see specification as filed for detailed description of substitutions, R-groups and preferred embodiments
  MOD_RES (15)..(18): Any L- or D-natural or non-natural amino acid, and this range may encompass 1 or 4 residues; see specification as filed for detailed description of substitutions, R-groups and preferred embodiments
  c-term may be amidated

SEQ ID NO: 866 - protein, 32 aa, Artificial Sequence; identical to SEQ ID NO: 818
  Description of Artificial Sequence: Synthetic peptide
  MOD_RES (2)..(2): Any L- or D-natural amino acid and any non-natural amino acid; see specification as filed for detailed description of substitutions, R-groups and preferred embodiments
  MOD_RES (9)..(10): Any L- or D-natural amino acid and any non-natural amino acid; see specification as filed for detailed description of substitutions, R-groups and preferred embodiments
  MOD_RES (13)..(13): Any L- or D-natural amino acid and any non-natural amino acid; see specification as filed for detailed description of substitutions, R-groups and preferred embodiments
  MOD_RES (15)..(18): Any L- or D-natural or non-natural amino acid, and this range may encompass 1 or 4 residues; see specification as filed for detailed description of substitutions, R-groups and preferred embodiments
  c-term may be amidated

SEQ ID NO: 867 - protein, 32 aa, Artificial Sequence; identical to SEQ ID NO: 819
  Description of Artificial Sequence: Synthetic peptide
  MOD_RES (3)..(3): Any L- or D-natural amino acid and any non-natural amino acid; see specification as filed for detailed description of substitutions, R-groups and preferred embodiments
  MOD_RES (9)..(10): Any L- or D-natural amino acid and any non-natural amino acid; see specification as filed for detailed description of substitutions, R-groups and preferred embodiments
  MOD_RES (13)..(13): Any L- or D-natural amino acid and any non-natural amino acid; see specification as filed for detailed description of substitutions, R-groups and preferred embodiments
  MOD_RES (15)..(18): Any L- or D-natural or non-natural amino acid, and this range may encompass 1 or 4 residues; see specification as filed for detailed description of substitutions, R-groups and preferred embodiments
  c-term may be amidated

SEQ ID NO: 868 - protein, 32 aa, Artificial Sequence; identical to SEQ ID NO: 820
  Description of Artificial Sequence: Synthetic peptide
  MOD_RES (4)..(4): Any L- or D-natural amino acid and any non-natural amino acid; see specification as filed for detailed description of substitutions, R-groups and preferred embodiments
  MOD_RES (9)..(10): Any L- or D-natural amino acid and any non-natural amino acid; see specification as filed for detailed description of substitutions, R-groups and preferred embodiments
  MOD_RES (13)..(13): Any L- or D-natural amino acid and any non-natural amino acid; see specification as filed for detailed description of substitutions, R-groups and preferred embodiments
  MOD_RES (15)..(18): Any L- or D-natural or non-natural amino acid, and this range may encompass 1 or 4 residues; see specification as filed for detailed description of substitutions, R-groups and preferred embodiments
  c-term may be amidated

SEQ ID NO: 869 - protein, 32 aa, Artificial Sequence; identical to SEQ ID NO: 821
  Description of Artificial Sequence: Synthetic peptide
  MOD_RES (5)..(5): Any L- or D-natural amino acid and any non-natural amino acid; see specification as filed for detailed description of substitutions, R-groups and preferred embodiments
  MOD_RES (9)..(10): Any L- or D-natural amino acid and any non-natural amino acid; see specification as filed for detailed description of substitutions, R-groups and preferred embodiments
  MOD_RES (13)..(13): Any L- or D-natural amino acid and any non-natural amino acid; see specification as filed for detailed description of substitutions, R-groups and preferred embodiments
  MOD_RES (15)..(18): Any L- or D-natural or non-natural amino acid, and this range may encompass 1 or 4 residues; see specification as filed for detailed description of substitutions, R-groups and preferred embodiments
  c-term may be amidated

SEQ ID NO: 870 - protein, 32 aa, Artificial Sequence; identical to SEQ ID NO: 822
  Description of Artificial Sequence: Synthetic peptide
  MOD_RES (6)..(6): Any L- or D-natural amino acid and any non-natural amino acid; see specification as filed for detailed description of substitutions, R-groups and preferred embodiments
  MOD_RES (9)..(10): Any L- or D-natural amino acid and any non-natural amino acid; see specification as filed for detailed description of substitutions, R-groups and preferred embodiments
  MOD_RES (13)..(13): Any L- or D-natural amino acid and any non-natural amino acid; see specification as filed for detailed description of substitutions, R-groups and preferred embodiments
  MOD_RES (15)..(18): Any L- or D-natural or non-natural amino acid, and this range may encompass 1 or 4 residues; see specification as filed for detailed description of substitutions, R-groups and preferred embodiments
  c-term may be amidated

SEQ ID NO: 871 - protein, 32 aa, Artificial Sequence; identical to SEQ ID NO: 823
  Description of Artificial Sequence: Synthetic peptide
  MOD_RES (7)..(7): Any L- or D-natural amino acid and any non-natural amino acid; see specification as filed for detailed description of substitutions, R-groups and preferred embodiments
  MOD_RES (9)..(10): Any L- or D-natural amino acid and any non-natural amino acid; see specification as filed for detailed description of substitutions, R-groups and preferred embodiments
  MOD_RES (13)..(13): Any L- or D-natural amino acid and any non-natural amino acid; see specification as filed for detailed description of substitutions, R-groups and preferred embodiments
  MOD_RES (15)..(18): Any L- or D-natural or non-natural amino acid, and this range may encompass 1 or 4 residues; see specification as filed for detailed description of substitutions, R-groups and preferred embodiments
  c-term may be amidated

SEQ ID NO: 872 - protein, 32 aa, Artificial Sequence; identical to SEQ ID NO: 824
  Description of Artificial Sequence: Synthetic peptide
  MOD_RES (8)..(10): Any L- or D-natural amino acid and any non-natural amino acid; see specification as filed for detailed description of substitutions, R-groups and preferred embodiments
  MOD_RES (13)..(13): Any L- or D-natural amino acid and any non-natural amino acid; see specification as filed for detailed description of substitutions, R-groups and preferred embodiments
  MOD_RES (15)..(18): Any L- or D-natural or non-natural amino acid, and this range may encompass 1 or 4 residues; see specification as filed for detailed description of substitutions, R-groups and preferred embodiments
  c-term may be amidated

SEQ ID NO: 873 - protein, 32 aa, Artificial Sequence; identical to SEQ ID NO: 825
  Description of Artificial Sequence: Synthetic peptide
  MOD_RES (9)..(10): Any L- or D-natural amino acid and any non-natural amino acid; see specification as filed for detailed description of substitutions, R-groups and preferred embodiments
  MOD_RES (14)..(14): Any L- or D-natural amino acid and any non-natural amino acid; see specification as filed for detailed description of substitutions, R-groups and preferred embodiments
  MOD_RES (15)..(18): Any L- or D-natural or non-natural amino acid, and this range may encompass 1 or 4 residues; see specification as filed for detailed description of substitutions, R-groups and preferred embodiments
  c-term may be amidated

SEQ ID NO: 874 - protein, 32 aa, Artificial Sequence; identical to SEQ ID NO: 826
  Description of Artificial Sequence: Synthetic peptide
  MOD_RES (1)..(1): Any L- or D-natural amino acid and any non-natural amino acid; see specification as filed for detailed description of substitutions, R-groups and preferred embodiments
  MOD_RES (9)..(10): Any L- or D-natural amino acid and any non-natural amino acid; see specification as filed for detailed description of substitutions, R-groups and preferred embodiments
  MOD_RES (14)..(14): Any L- or D-natural amino acid and any non-natural amino acid; see specification as filed for detailed description of substitutions, R-groups and preferred embodiments
  MOD_RES (15)..(18): Any L- or D-natural or non-natural amino acid, and this range may encompass 1 or 4 residues; see specification as filed for detailed description of substitutions, R-groups and preferred embodiments
  c-term may be amidated

SEQ ID NO: 875 - protein, 32 aa, Artificial Sequence; identical to SEQ ID NO: 827
  Description of Artificial Sequence: Synthetic peptide
  MOD_RES (2)..(2): Any L- or D-natural amino acid and any non-natural amino acid; see specification as filed for detailed description of substitutions, R-groups and preferred embodiments
  MOD_RES (9)..(10): Any L- or D-natural amino acid and any non-natural amino acid; see specification as filed for detailed description of substitutions, R-groups and preferred embodiments
  MOD_RES (14)..(14): Any L- or D-natural amino acid and any non-natural amino acid; see specification as filed for detailed description of substitutions, R-groups and preferred embodiments
  MOD_RES (15)..(18): Any L- or D-natural or non-natural amino acid, and this range may encompass 1 or 4 residues; see specification as filed for detailed description of substitutions, R-groups and preferred embodiments
  c-term may be amidated

SEQ ID NO: 876 - protein, 32 aa, Artificial Sequence; identical to SEQ ID NO: 828
  Description of Artificial Sequence: Synthetic peptide
  MOD_RES (3)..(3): Any L- or D-natural amino acid and any non-natural amino acid; see specification as filed for detailed description of substitutions, R-groups and preferred embodiments
  MOD_RES (9)..(10): Any L- or D-natural amino acid and any non-natural amino acid; see specification as filed for detailed description of substitutions, R-groups and preferred embodiments
  MOD_RES (14)..(14): Any L- or D-natural amino acid and any non-natural amino acid; see specification as filed for detailed description of substitutions, R-groups and preferred embodiments
  MOD_RES (15)..(18): Any L- or D-natural or non-natural amino acid, and this range may encompass 1 or 4 residues; see specification as filed for detailed description of substitutions, R-groups and preferred embodiments
  c-term may be amidated

SEQ ID NO: 877 - protein, 32 aa, Artificial Sequence; identical to SEQ ID NO: 829
  Description of Artificial Sequence: Synthetic peptide
  MOD_RES (4)..(4): Any L- or D-natural amino acid and any non-natural amino acid; see specification as filed for detailed description of substitutions, R-groups and preferred embodiments
  MOD_RES (9)..(10): Any L- or D-natural amino acid and any non-natural amino acid; see specification as filed for detailed description of substitutions, R-groups and preferred embodiments
  MOD_RES (14)..(14): Any L- or D-natural amino acid and any non-natural amino acid; see specification as filed for detailed description of substitutions, R-groups and preferred embodiments
  MOD_RES (15)..(18): Any L- or D-natural or non-natural amino acid, and this range may encompass 1 or 4 residues; see specification as filed for detailed description of substitutions, R-groups and preferred embodiments
  c-term may be amidated

SEQ ID NO: 878 - protein, 32 aa, Artificial Sequence; identical to SEQ ID NO: 830
  Description of Artificial Sequence: Synthetic peptide
  MOD_RES (5)..(5): Any L- or D-natural amino acid and any non-natural amino acid; see specification as filed for detailed description of substitutions, R-groups and preferred embodiments
  MOD_RES (9)..(10): Any L- or D-natural amino acid and any non-natural amino acid; see specification as filed for detailed description of substitutions, R-groups and preferred embodiments
  MOD_RES (14)..(14): Any L- or D-natural amino acid and any non-natural amino acid; see specification as filed for detailed description of substitutions, R-groups and preferred embodiments
  MOD_RES (15)..(18): Any L- or D-natural or non-natural amino acid, and this range may encompass 1 or 4 residues; see specification as filed for detailed description of substitutions, R-groups and preferred embodiments
  c-term may be amidated

SEQ ID NO: 879 - protein, 32 aa, Artificial Sequence; identical to SEQ ID NO: 831
  Description of Artificial Sequence: Synthetic peptide
  MOD_RES (6)..(6): Any L- or D-natural amino acid and any non-natural amino acid; see specification as filed for detailed description of substitutions, R-groups and preferred embodiments
  MOD_RES (9)..(10): Any L- or D-natural amino acid and any non-natural amino acid; see specification as filed for detailed description of substitutions, R-groups and preferred embodiments
  MOD_RES (14)..(14): Any L- or D-natural amino acid and any non-natural amino acid; see specification as filed for detailed description of substitutions, R-groups and preferred embodiments
  MOD_RES (15)..(18): Any L- or D-natural or non-natural amino acid, and this range may encompass 1 or 4 residues; see specification as filed for detailed description of substitutions, R-groups and preferred embodiments
  c-term may be amidated

SEQ ID NO: 880 - protein, 32 aa, Artificial Sequence; identical to SEQ ID NO: 832
  Description of Artificial Sequence: Synthetic peptide
  MOD_RES (7)..(7): Any L- or D-natural amino acid and any non-natural amino acid; see specification as filed for detailed description of substitutions, R-groups and preferred embodiments
  MOD_RES (9)..(10): Any L- or D-natural amino acid and any non-natural amino acid; see specification as filed for detailed description of substitutions, R-groups and preferred embodiments
  MOD_RES (14)..(14): Any L- or D-natural amino acid and any non-natural amino acid; see specification as filed for detailed description of substitutions, R-groups and preferred embodiments
  MOD_RES (15)..(18): Any L- or D-natural or non-natural amino acid, and this range may encompass 1 or 4 residues; see specification as filed for detailed description of substitutions, R-groups and preferred embodiments
  c-term may be amidated

SEQ ID NO: 881 - protein, 32 aa, Artificial Sequence; identical to SEQ ID NO: 833
  Description of Artificial Sequence: Synthetic peptide
  MOD_RES (8)..(10): Any L- or D-natural amino acid and any non-natural amino acid; see specification as filed for detailed description of substitutions, R-groups and preferred embodiments
  MOD_RES (14)..(14): Any L- or D-natural amino acid and any non-natural amino acid; see specification as filed for detailed description of substitutions, R-groups and preferred embodiments
  MOD_RES (15)..(18): Any L- or D-natural or non-natural amino acid, and this range may encompass 1 or 4 residues; see specification as filed for detailed description of substitutions, R-groups and preferred embodiments
  c-term may be amidated

SEQ ID NO: 882 - protein, 9 aa, Artificial Sequence
  Description of Artificial Sequence: Synthetic peptide
  c-term may be amidated
SPYSSDTTP

SEQ ID NO: 883 - protein, 23 aa, Artificial Sequence
  Description of Artificial Sequence: Synthetic peptide
  c-term may be amidated
AFAYIARPLPRAHIKEYFYTSGK

SEQ ID NO: 884 - protein, 15 aa, Artificial Sequence
  Description of Artificial Sequence: Synthetic peptide
  c-term may be amidated
SNPAVVFVTRKNRQV

SEQ ID NO: 885 - protein, 33 aa, Artificial Sequence
  Description of Artificial Sequence: Synthetic peptide
  c-term may be amidated
SPYSSDTTPCCFAYIARPLPRAHIKEYFYTSGK

SEQ ID NO: 886 - protein, 18 aa, Artificial Sequence
  Description of Artificial Sequence: Synthetic peptide
  c-term may be amidated
ANPEKKWVREYINSLEMS

SEQ ID NO: 887 - protein, 33 aa, Artificial Sequence
  Description of Artificial Sequence: Synthetic peptide
  MOD_RES (15)..(18): Any L- or D-natural or non-natural amino acid, and this range may encompass 1 or 4 residues; see specification as filed for detailed description of substitutions, R-groups and preferred embodiments
  c-term may be amidated
SPYSSDTTPCCFAYXXXXEKKWVREYINSLEMS

SEQ ID NO: 888 - protein, 33 aa, Artificial Sequence
  Description of Artificial Sequence: Synthetic peptide
  MOD_RES (1)..(1): Any L- or D-natural amino acid and any non-natural amino acid; see specification as filed for detailed description of substitutions, R-groups and preferred embodiments
  MOD_RES (10)..(11): Any L- or D-natural amino acid and any non-natural amino acid; see specification as filed for detailed description of substitutions, R-groups and preferred embodiments
  MOD_RES (15)..(18): Any L- or D-natural or non-natural amino acid, and this range may encompass 1 or 4 residues; see specification as filed for detailed description of substitutions, R-groups and preferred embodiments
  c-term may be amidated
XPYSSDTTPXXFAYXXXXEKKWVREYINSLEMS

SEQ ID NO: 889 - protein, 33 aa, Artificial Sequence
  Description of Artificial Sequence: Synthetic peptide
  MOD_RES (2)..(2): Any L- or D-natural amino acid and any non-natural amino acid; see specification as filed for detailed description of substitutions, R-groups and preferred embodiments
  MOD_RES (10)..(11): Any L- or D-natural amino acid and any non-natural amino acid; see specification as filed for detailed description of substitutions, R-groups and preferred embodiments
  MOD_RES (15)..(18): Any L- or D-natural or non-natural amino acid, and this range may encompass 1 or 4 residues; see specification as filed for detailed description of substitutions, R-groups and preferred embodiments
  c-term may be amidated
SXYSSDTTPXXFAYXXXXEKKWVREYINSLEMS

SEQ ID NO: 890 - protein, 33 aa, Artificial Sequence
  Description of Artificial Sequence: Synthetic peptide
  MOD_RES (3)..(3): Any L- or D-natural amino acid and any non-natural amino acid; see specification as filed for detailed description of substitutions, R-groups and preferred embodiments
  MOD_RES (10)..(11): Any L- or D-natural amino acid and any non-natural amino acid; see specification as filed for detailed description of substitutions, R-groups and preferred embodiments
  MOD_RES (15)..(18): Any L- or D-natural or non-natural amino acid, and this range may encompass 1 or 4 residues; see specification as filed for detailed description of substitutions, R-groups and preferred embodiments
  c-term may be amidated
SPXSSDTTPXXFAYXXXXEKKWVREYINSLEMS

SEQ ID NO: 891 - protein, 33 aa, Artificial Sequence
  Description of Artificial Sequence: Synthetic peptide
  MOD_RES (4)..(4): Any L- or D-natural amino acid and any non-natural amino acid; see specification as filed for detailed description of substitutions, R-groups and preferred embodiments
  MOD_RES (10)..(11): Any L- or D-natural amino acid and any non-natural amino acid; see specification as filed for detailed description of substitutions, R-groups and preferred embodiments
  MOD_RES (15)..(18): Any L- or D-natural or non-natural amino acid, and this range may encompass 1 or 4 residues; see specification as filed for detailed description of substitutions, R-groups and preferred embodiments
  c-term may be amidated
SPYXSDTTPXXFAYXXXXEKKWVREYINSLEMS

SEQ ID NO: 892 - protein, 33 aa, Artificial Sequence
  Description of Artificial Sequence: Synthetic peptide
  MOD_RES (5)..(5): Any L- or D-natural amino acid and any non-natural amino acid; see specification as filed for detailed description of substitutions, R-groups and preferred embodiments
  MOD_RES (10)..(11): Any L- or D-natural amino acid and any non-natural amino acid; see specification as filed for detailed description of substitutions, R-groups and preferred embodiments
  MOD_RES (15)..(18): Any L- or D-natural or non-natural amino acid, and this range may encompass 1 or 4 residues; see specification as filed for detailed description of substitutions, R-groups and preferred embodiments
  c-term may be amidated
SPYSXDTTPXXFAYXXXXEKKWVREYINSLEMS

SEQ ID NO: 893 - protein, 33 aa, Artificial Sequence
  Description of Artificial Sequence: Synthetic peptide
  MOD_RES (6)..(6): Any L- or D-natural amino acid and any non-natural amino acid; see specification as filed for detailed description of substitutions, R-groups and preferred embodiments
  MOD_RES (10)..(11): Any L- or D-natural amino acid and any non-natural amino acid; see specification as filed for detailed description of substitutions, R-groups and preferred embodiments
  MOD_RES (15)..(18): Any L- or D-natural or non-natural amino acid, and this range may encompass 1 or 4 residues; see specification as filed for detailed description of substitutions, R-groups and preferred embodiments
  c-term may be amidated
SPYSSXTTPXXFAYXXXXEKKWVREYINSLEMS

SEQ ID NO: 894 - protein, 33 aa, Artificial Sequence
  Description of Artificial Sequence: Synthetic peptide
  MOD_RES (7)..(7): Any L- or D-natural amino acid and any non-natural amino acid; see specification as filed for detailed description of substitutions, R-groups and preferred embodiments
  MOD_RES (10)..(11): Any L- or D-natural amino acid and any non-natural amino acid; see specification as filed for detailed description of substitutions, R-groups and preferred embodiments
  MOD_RES (15)..(18): Any L- or D-natural or non-natural amino acid, and this range may encompass 1 or 4 residues; see specification as filed for detailed description of substitutions, R-groups and preferred embodiments
  c-term may be amidated
SPYSSDXTPXXFAYXXXXEKKWVREYINSLEMS

SEQ ID NO: 895 - protein, 33 aa, Artificial Sequence
  Description of Artificial Sequence: Synthetic peptide
  MOD_RES (8)..(8): Any L- or D-natural amino acid and any non-natural amino acid; see specification as filed for detailed description of substitutions, R-groups and preferred embodiments
  MOD_RES (10)..(11): Any L- or D-natural amino acid and any non-natural amino acid; see specification as filed for detailed description of substitutions, R-groups and preferred embodiments
  MOD_RES (15)..(18): Any L- or D-natural or non-natural amino acid, and this range may encompass 1 or 4 residues; see specification as filed for detailed description of substitutions, R-groups and preferred embodiments
  c-term may be amidated
SPYSSDTXPXXFAYXXXXEKKWVREYINSLEMS

SEQ ID NO: 896 - protein, 33 aa, Artificial Sequence
  Description of Artificial Sequence: Synthetic peptide
  MOD_RES (9)..(11): Any L- or D-natural amino acid and any non-natural amino acid; see specification as filed for detailed description of substitutions, R-groups and preferred embodiments
  MOD_RES (15)..(18): Any L- or D-natural or non-natural amino acid, and this range may encompass 1 or 4 residues; see specification as filed for detailed description of substitutions, R-groups and preferred embodiments
  c-term may be amidated
SPYSSDTTXXXFAYXXXXEKKWVREYINSLEMS

SEQ ID NO: 897 - protein, 33 aa, Artificial Sequence
  Description of Artificial Sequence: Synthetic peptide
  MOD_RES (12)..(12): Any L- or D-natural amino acid and any non-natural amino acid; see specification as filed for detailed description of substitutions, R-groups and preferred embodiments
  MOD_RES (15)..(18): Any L- or D-natural or non-natural amino acid, and this range may encompass 1 or 4 residues; see specification as filed for detailed description of substitutions, R-groups and preferred embodiments
  c-term may be amidated
SPYSSDTTPCCXAYXXXXEKKWVREYINSLEMS

SEQ ID NO: 898 - protein, 33 aa, Artificial Sequence
  Description of Artificial Sequence: Synthetic peptide
  MOD_RES (1)..(1): Any L- or D-natural amino acid and any non-natural amino acid; see specification as filed for detailed description of substitutions, R-groups and preferred embodiments
  MOD_RES (10)..(12): Any L- or D-natural amino acid and any non-natural amino acid; see specification as filed for detailed description of substitutions, R-groups and preferred embodiments
  MOD_RES (15)..(18): Any L- or D-natural or non-natural amino acid, and this range may encompass 1 or 4 residues; see specification as filed for detailed description of substitutions, R-groups and preferred embodiments
  c-term may be amidated
XPYSSDTTPXXXAYXXXXEKKWVREYINSLEMS

SEQ ID NO: 899 - protein, 33 aa, Artificial Sequence
  Description of Artificial Sequence: Synthetic peptide
  MOD_RES (2)..(2): Any L- or D-natural amino acid and any non-natural amino acid; see specification as filed for detailed description of substitutions, R-groups and preferred embodiments
  MOD_RES (10)..(12): Any L- or D-natural amino acid and any non-natural amino acid; see specification as filed for detailed description of substitutions, R-groups and preferred embodiments
  MOD_RES (15)..(18): Any L- or D-natural or non-natural amino acid, and this range may encompass 1 or 4 residues; see specification as filed for detailed description of substitutions, R-groups and preferred embodiments
  c-term may be amidated
SXYSSDTTPXXXAYXXXXEKKWVREYINSLEMS

SEQ ID NO: 900 - protein, 33 aa, Artificial Sequence
  Description of Artificial Sequence: Synthetic peptide
  MOD_RES (3)..(3): Any L- or D-natural amino acid and any non-natural amino acid; see specification as filed for detailed description of substitutions, R-groups and preferred embodiments
  MOD_RES (10)..(12): Any L- or D-natural amino acid and any non-natural amino acid; see specification as filed for detailed description of substitutions, R-groups and preferred embodiments
  MOD_RES (15)..(18): Any L- or D-natural or non-natural amino acid, and this range may encompass 1 or 4 residues; see specification as filed for detailed description of substitutions, R-groups and preferred embodiments
  c-term may be amidated
SPXSSDTTPXXXAYXXXXEKKWVREYINSLEMS

SEQ ID NO: 901 - protein, 33 aa, Artificial Sequence
  Description of Artificial Sequence: Synthetic peptide
  MOD_RES (4)..(4): Any L- or D-natural amino acid and any non-natural amino acid; see specification as filed for detailed description of substitutions, R-groups and preferred embodiments
  MOD_RES (10)..(12): Any L- or D-natural amino acid and any non-natural amino acid; see specification as filed for detailed description of substitutions, R-groups and preferred embodiments
  MOD_RES (15)..(18): Any L- or D-natural or non-natural amino acid, and this range may encompass 1 or 4 residues; see specification as filed for detailed description of substitutions, R-groups and preferred embodiments
  c-term may be amidated
SPYXSDTTPXXXAYXXXXEKKWVREYINSLEMS

SEQ ID NO: 902 - protein, 33 aa, Artificial Sequence
  Description of Artificial Sequence: Synthetic peptide
  MOD_RES (5)..(5): Any L- or D-natural amino acid and any non-natural amino acid; see specification as filed for detailed description of substitutions, R-groups and preferred embodiments
  MOD_RES (10)..(12): Any L- or D-natural amino acid and any non-natural amino acid; see specification as filed for detailed description of substitutions, R-groups and preferred embodiments
  MOD_RES (15)..(18): Any L- or D-natural or non-natural amino acid, and this range may encompass 1 or 4 residues; see specification as filed for detailed description of substitutions, R-groups and preferred embodiments
  c-term may be amidated
SPYSXDTTPXXXAYXXXXEKKWVREYINSLEMS

SEQ ID NO: 903 - protein, 33 aa, Artificial Sequence
  Description of Artificial Sequence: Synthetic peptide
  MOD_RES (6)..(6): Any L- or D-natural amino acid and any non-natural amino acid; see specification as filed for detailed description of substitutions, R-groups and preferred embodiments
  MOD_RES (10)..(12): Any L- or D-natural amino acid and any non-natural amino acid; see specification as filed for detailed description of substitutions, R-groups and preferred embodiments
  MOD_RES (15)..(18): Any L- or D-natural or non-natural amino acid, and this range may encompass 1 or 4 residues; see specification as filed for detailed description of substitutions, R-groups and preferred embodiments
  c-term may be amidated
SPYSSXTTPXXXAYXXXXEKKWVREYINSLEMS

SEQ ID NO: 904 - protein, 33 aa, Artificial Sequence
  Description of Artificial Sequence: Synthetic peptide
  MOD_RES (7)..(7): Any L- or D-natural amino acid and any non-natural amino acid; see specification as filed for detailed description of substitutions, R-groups and preferred embodiments
  MOD_RES (10)..(12): Any L- or D-natural amino acid and any non-natural amino acid; see specification as filed for detailed description of substitutions, R-groups and preferred embodiments
  MOD_RES (15)..(18): Any L- or D-natural or non-natural amino acid, and this range may encompass 1 or 4 residues; see specification as filed for detailed description of substitutions, R-groups and preferred embodiments
  c-term may be amidated
SPYSSDXTPXXXAYXXXXEKKWVREYINSLEMS

SEQ ID NO: 905 - protein, 33 aa, Artificial Sequence
  Description of Artificial Sequence: Synthetic peptide
  MOD_RES (8)..(8): Any L- or D-natural amino acid and any non-natural amino acid; see specification as filed for detailed description of substitutions, R-groups and preferred embodiments
  MOD_RES (10)..(12): Any L- or D-natural amino acid and any non-natural amino acid; see specification as filed for detailed description of substitutions, R-groups and preferred embodiments
  MOD_RES (15)..(18): Any L- or D-natural or non-natural amino acid, and this range may encompass 1 or 4 residues; see specification as filed for detailed description of substitutions, R-groups and preferred embodiments
  c-term may be amidated
SPYSSDTXPXXXAYXXXXEKKWVREYINSLEMS

SEQ ID NO: 906 - protein, 33 aa, Artificial Sequence
  Description of Artificial Sequence: Synthetic peptide
  MOD_RES (9)..(12): Any L- or D-natural amino acid and any non-natural amino acid; see specification as filed for detailed description of substitutions, R-groups and preferred embodiments
  MOD_RES (15)..(18): Any L- or D-natural or non-natural amino acid, and this range may encompass 1 or 4 residues; see specification as filed for detailed description of substitutions, R-groups and preferred embodiments
  c-term may be amidated
SPYSSDTTXXXXAYXXXXEKKWVREYINSLEMS

SEQ ID NO: 907 - protein, 33 aa, Artificial Sequence
  Description of Artificial Sequence: Synthetic peptide
  MOD_RES (13)..(13): Any L- or D-natural amino acid and any non-natural amino acid; see specification as filed for detailed description of substitutions, R-groups and preferred embodiments
  MOD_RES (15)..(18): Any L- or D-natural or non-natural amino acid, and this range may encompass 1 or 4 residues; see specification as filed for detailed description of substitutions, R-groups and preferred embodiments
  c-term may be amidated
SPYSSDTTPCCFXYXXXXEKKWVREYINSLEMS

SEQ ID NO: 908 - protein, 33 aa, Artificial Sequence
  Description of Artificial Sequence: Synthetic peptide
  MOD_RES (1)..(1): Any L- or D-natural amino acid and any non-natural amino acid; see specification as filed for detailed description of substitutions, R-groups and preferred embodiments
  MOD_RES (10)..(11): Any L- or D-natural amino acid and any non-natural amino acid; see specification as filed for detailed description of substitutions, R-groups and preferred embodiments
  MOD_RES (13)..(13): Any L- or D-natural amino acid and any non-natural amino acid; see specification as filed for detailed description of substitutions, R-groups and preferred embodiments
  MOD_RES (15)..(18): Any L- or D-natural or non-natural amino acid, and this range may encompass 1 or 4 residues; see specification as filed for detailed description of substitutions, R-groups and preferred embodiments
  c-term may be amidated
XPYSSDTTPXXFXYXXXXEKKWVREYINSLEMS

SEQ ID NO: 909 - protein, 33 aa, Artificial Sequence
  Description of Artificial Sequence: Synthetic peptide
  MOD_RES (2)..(2): Any L- or D-natural amino acid and any non-natural amino acid; see specification as filed for detailed description of substitutions, R-groups and preferred embodiments
  MOD_RES (10)..(11): Any L- or D-natural amino acid and any non-natural amino acid; see specification as filed for detailed description of substitutions, R-groups and preferred embodiments
  MOD_RES (13)..(13): Any L- or D-natural amino acid and any non-natural amino acid; see specification as filed for detailed description of substitutions, R-groups and preferred embodiments
  MOD_RES (15)..(18): Any L- or D-natural or non-natural amino acid, and this range may encompass 1 or 4 residues; see specification as filed for detailed description of substitutions, R-groups and preferred embodiments
  c-term may be amidated
SXYSSDTTPXXFXYXXXXEKKWVREYINSLEMS

SEQ ID NO: 910 - protein, 33 aa, Artificial Sequence
  Description of Artificial Sequence: Synthetic peptide
  MOD_RES (3)..(3): Any L- or D-natural amino acid and any non-natural amino acid; see specification as filed for detailed description of substitutions, R-groups and preferred embodiments
  MOD_RES (10)..(11): Any L- or D-natural amino acid and any non-natural amino acid; see specification as filed for detailed description of substitutions, R-groups and preferred embodiments
  MOD_RES (13)..(13): Any L- or D-natural amino acid and any non-natural amino acid; see specification as filed for detailed description of substitutions, R-groups and preferred embodiments
  MOD_RES (15)..(18): Any L- or D-natural or non-natural amino acid, and this range may encompass 1 or 4 residues; see specification as filed for detailed description of substitutions, R-groups and preferred embodiments
  c-term may be amidated
SPXSSDTTPXXFXYXXXXEKKWVREYINSLEMS

SEQ ID NO: 911 - protein, 33 aa, Artificial Sequence
  Description of Artificial Sequence: Synthetic peptide
  MOD_RES (4)..(4): Any L- or D-natural amino acid and any non-natural amino acid; see specification as filed for detailed description of substitutions, R-groups and preferred embodiments
  MOD_RES (10)..(11): Any L- or D-natural amino acid and any non-natural amino acid; see specification as filed for detailed description of substitutions, R-groups and preferred embodiments
  MOD_RES (13)..(13): Any L- or D-natural amino acid and any non-natural amino acid; see specification as filed for detailed description of substitutions, R-groups and preferred embodiments
  MOD_RES (15)..(18): Any L- or D-natural or non-natural amino acid, and this range may encompass 1 or 4 residues; see specification as filed for detailed description of substitutions, R-groups and preferred embodiments
  c-term may be amidated
SPYXSDTTPXXFXYXXXXEKKWVREYINSLEMS

SEQ ID NO: 912 - protein, 33 aa, Artificial Sequence
  Description of Artificial Sequence: Synthetic peptide
  MOD_RES (5)..(5): Any L- or D-natural amino acid and any non-natural amino acid; see specification as filed for detailed description of substitutions, R-groups and preferred embodiments
  MOD_RES (10)..(11): Any L- or D-natural amino acid and any non-natural amino acid; see specification as filed for detailed description of substitutions, R-groups and preferred embodiments
  MOD_RES (13)..(13): Any L- or D-natural amino acid and any non-natural amino acid; see specification as filed for detailed description of substitutions, R-groups and preferred embodiments
  MOD_RES (15)..(18): Any L- or D-natural or non-natural amino acid, and this range may encompass 1 or 4 residues; see specification as filed for detailed description of substitutions, R-groups and preferred embodiments
  c-term may be amidated
SPYSXDTTPXXFXYXXXXEKKWVREYINSLEMS

SEQ ID NO: 913 - protein, 33 aa, Artificial Sequence
  Description of Artificial Sequence: Synthetic peptide
  MOD_RES (6)..(6): Any L- or D-natural amino acid and any non-natural amino acid; see specification as filed for detailed description of substitutions, R-groups and preferred embodiments
  MOD_RES (10)..(11): Any L- or D-natural amino acid and any non-natural amino acid; see specification as filed for detailed description of substitutions, R-groups and preferred embodiments
  MOD_RES (13)..(13): Any L- or D-natural amino acid and any non-natural amino acid; see specification as filed for detailed description of substitutions, R-groups and preferred embodiments
  MOD_RES (15)..(18): Any L- or D-natural or non-natural amino acid, and this range may encompass 1 or 4 residues; see specification as filed for detailed description of substitutions, R-groups and preferred embodiments
  c-term may be amidated
SPYSSXTTPXXFXYXXXXEKKWVREYINSLEMS

SEQ ID NO: 914 - protein, 33 aa, Artificial Sequence
  Description of Artificial Sequence: Synthetic peptide
  MOD_RES (7)..(7): Any L- or D-natural amino acid and any non-natural amino acid; see specification as filed for detailed description of substitutions, R-groups and preferred embodiments
  MOD_RES (10)..(11): Any L- or D-natural amino acid and any non-natural amino acid; see specification as filed for detailed description of substitutions, R-groups and preferred embodiments
  MOD_RES (13)..(13): Any L- or D-natural amino acid and any non-natural amino acid; see specification as filed for detailed description of substitutions, R-groups and preferred embodiments
  MOD_RES (15)..(18): Any L- or D-natural or non-natural amino acid, and this range may encompass 1 or 4 residues; see specification as filed for detailed description of substitutions, R-groups and preferred embodiments
  c-term may be amidated
SPYSSDXTPXXFXYXXXXEKKWVREYINSLEMS

SEQ ID NO: 915 - protein, 33 aa, Artificial Sequence
  Description of Artificial Sequence: Synthetic peptide
  MOD_RES (8)..(8): Any L- or D-natural amino acid and any non-natural amino acid; see specification as filed for detailed description of substitutions, R-groups and preferred embodiments
  MOD_RES (10)..(11): Any L- or D-natural amino acid and any non-natural amino acid; see specification as filed for detailed description of substitutions, R-groups and preferred embodiments
  MOD_RES (13)..(13): Any L- or D-natural amino acid and any non-natural amino acid; see specification as filed for detailed description of substitutions, R-groups and preferred embodiments
  MOD_RES (15)..(18): Any L- or D-natural or non-natural amino acid, and this range may encompass 1 or 4 residues; see specification as filed for detailed description of substitutions, R-groups and preferred embodiments
  c-term may be amidated
SPYSSDTXPXXFXYXXXXEKKWVREYINSLEMS

SEQ ID NO: 916 - protein, 33 aa, Artificial Sequence
  Description of Artificial Sequence: Synthetic peptide
  MOD_RES (9)..(11): Any L- or D-natural amino acid and any non-natural amino acid; see specification as filed for detailed description of substitutions, R-groups and preferred embodiments
  MOD_RES (13)..(13): Any L- or D-natural amino acid and any non-natural amino acid; see specification as filed for detailed description of substitutions, R-groups and preferred embodiments
  MOD_RES (15)..(18): Any L- or D-natural or non-natural amino acid, and this range may encompass 1 or 4 residues; see specification as filed for detailed description of substitutions, R-groups and preferred embodiments
  c-term may be amidated
SPYSSDTTXXXFXYXXXXEKKWVREYINSLEMS

SEQ ID NO: 917 - protein, 33 aa, Artificial Sequence
  Description of Artificial Sequence: Synthetic peptide
  MOD_RES (14)..(14): Any L- or D-natural amino acid and any non-natural amino acid; see specification as filed for detailed description of substitutions, R-groups and preferred embodiments
  MOD_RES (15)..(18): Any L- or D-natural or non-natural amino acid, and this range may encompass 1 or 4 residues; see specification as filed for detailed description of substitutions, R-groups and preferred embodiments
  c-term may be amidated
SPYSSDTTPCCFAXXXXXEKKWVREYINSLEMS

SEQ ID NO: 918 - protein, 33 aa, Artificial Sequence
  Description of Artificial Sequence: Synthetic peptide
  MOD_RES (1)..(1): Any L- or D-natural amino acid and any non-natural amino acid; see specification as filed for detailed description of substitutions, R-groups and preferred embodiments
  MOD_RES (10)..(11): Any L- or D-natural amino acid and any non-natural amino acid; see specification as filed for detailed description of substitutions, R-groups and preferred embodiments
  MOD_RES (14)..(14): Any L- or D-natural amino acid and any non-natural amino acid; see specification as filed for detailed description of substitutions, R-groups and preferred embodiments
  MOD_RES (15)..(18): Any L- or D-natural or non-natural amino acid, and this range may encompass 1 or 4 residues; see specification as filed for detailed description of substitutions, R-groups and preferred embodiments
  c-term may be amidated
XPYSSDTTPXXFAXXXXXEKKWVREYINSLEMS

SEQ ID NO: 919 - protein, 33 aa, Artificial Sequence
  Description of Artificial Sequence: Synthetic peptide
  MOD_RES (2)..(2): Any L- or D-natural amino acid and any non-natural amino acid; see specification as filed for detailed description of substitutions, R-groups and preferred embodiments
  MOD_RES (10)..(11): Any L- or D-natural amino acid and any non-natural amino acid; see specification as filed for detailed description of substitutions, R-groups and preferred embodiments
  MOD_RES (14)..(14): Any L- or D-natural amino acid and any non-natural amino acid; see specification as filed for detailed description of substitutions, R-groups and preferred embodiments
  MOD_RES (15)..(18): Any L- or D-natural or non-natural amino acid, and this range may encompass 1 or 4 residues; see specification as filed for detailed description of substitutions, R-groups and preferred embodiments
  c-term may be amidated
SXYSSDTTPXXFAXXXXXEKKWVREYINSLEMS

SEQ ID NO: 920 - protein, 33 aa, Artificial Sequence
  Description of Artificial Sequence: Synthetic peptide
  MOD_RES (3)..(3): Any L- or D-natural amino acid and any non-natural amino acid; see specification as filed for detailed description of substitutions, R-groups and preferred embodiments
  MOD_RES (10)..(11): Any L- or D-natural amino acid and any non-natural amino acid; see specification as filed for detailed description of substitutions, R-groups and preferred embodiments
  MOD_RES (14)..(14): Any L- or D-natural amino acid and any non-natural amino acid; see specification as filed for detailed description of substitutions, R-groups and preferred embodiments
  MOD_RES (15)..(18): Any L- or D-natural or non-natural amino acid, and this range may encompass 1 or 4 residues; see specification as filed for detailed description of substitutions, R-groups and preferred embodiments
  c-term may be amidated
SPXSSDTTPXXFAXXXXXEKKWVREYINSLEMS

SEQ ID NO: 921 - protein, 33 aa, Artificial Sequence
  Description of Artificial Sequence: Synthetic peptide
  MOD_RES (4)..(4): Any L- or D-natural amino acid and any non-natural amino acid; see specification as filed for detailed description of substitutions, R-groups and preferred embodiments
  MOD_RES (10)..(11): Any L- or D-natural amino acid and any non-natural amino acid; see specification as filed for detailed description of substitutions, R-groups and preferred embodiments
  MOD_RES (14)..(14): Any L- or D-natural amino acid and any non-natural amino acid; see specification as filed for detailed description of substitutions, R-groups and preferred embodiments
  MOD_RES (15)..(18): Any L- or D-natural or non-natural amino acid, and this range may encompass 1 or 4 residues; see specification as filed for detailed description of substitutions, R-groups and preferred embodiments
  c-term may be amidated
SPYXSDTTPXXFAXXXXXEKKWVREYINSLEMS

SEQ ID NO: 922 - protein, 33 aa, Artificial Sequence
  Description of Artificial Sequence: Synthetic peptide
  MOD_RES (5)..(5): Any L- or D-natural amino acid and any non-natural amino acid; see specification as filed for detailed description of substitutions, R-groups and preferred embodiments
  MOD_RES (10)..(11): Any L- or D-natural amino acid and any non-natural amino acid; see specification as filed for detailed description of substitutions, R-groups and preferred embodiments
  MOD_RES (14)..(14): Any L- or D-natural amino acid and any non-natural amino acid; see specification as filed for detailed description of substitutions, R-groups and preferred embodiments
  MOD_RES (15)..(18): Any L- or D-natural or non-natural amino acid, and this range may encompass 1 or 4 residues; see specification as filed for detailed description of substitutions, R-groups and preferred embodiments
  c-term may be amidated
SPYSXDTTPXXFAXXXXXEKKWVREYINSLEMS

SEQ ID NO: 923 - protein, 33 aa, Artificial Sequence
  Description of Artificial Sequence: Synthetic peptide
  MOD_RES (6)..(6): Any L- or D-natural amino acid and any non-natural amino acid; see specification as filed for detailed description of substitutions, R-groups and preferred embodiments
  MOD_RES (10)..(11): Any L- or D-natural amino acid and any non-natural amino acid; see specification as filed for detailed description of substitutions, R-groups and preferred embodiments
  MOD_RES (14)..(14): Any L- or D-natural amino acid and any non-natural amino acid; see specification as filed for detailed description of substitutions, R-groups and preferred embodiments
  MOD_RES (15)..(18): Any L- or D-natural or non-natural amino acid, and this range may encompass 1 or 4 residues; see specification as filed for detailed description of substitutions, R-groups and preferred embodiments
  c-term may be amidated
SPYSSXTTPXXFAXXXXXEKKWVREYINSLEMS

SEQ ID NO: 924 - protein, 33 aa, Artificial Sequence
  Description of Artificial Sequence: Synthetic peptide
  MOD_RES (7)..(7): Any L- or D-natural amino acid and any non-natural amino acid; see specification as filed for detailed description of substitutions, R-groups and preferred embodiments
  MOD_RES (10)..(11): Any L- or D-natural amino acid and any non-natural amino acid; see specification as filed for detailed description of substitutions, R-groups and preferred embodiments
  MOD_RES (14)..(14): Any L- or D-natural amino acid and any non-natural amino acid; see specification as filed for detailed description of substitutions, R-groups and preferred embodiments
  MOD_RES (15)..(18): Any L- or D-natural or non-natural amino acid, and this range may encompass 1 or 4 residues; see specification as filed for detailed description of substitutions, R-groups and preferred embodiments
  c-term may be amidated
SPYSSDXTPXXFAXXXXXEKKWVREYINSLEMS

SEQ ID NO: 925 - protein, 33 aa, Artificial Sequence
  Description of Artificial Sequence: Synthetic peptide
  MOD_RES (8)..(8): Any L- or D-natural amino acid and any non-natural amino acid; see specification as filed for detailed description of substitutions, R-groups and preferred embodiments
  MOD_RES (10)..(11): Any L- or D-natural amino acid and any non-natural amino acid; see specification as filed for detailed description of substitutions, R-groups and preferred embodiments
  MOD_RES (14)..(14): Any L- or D-natural amino acid and any non-natural amino acid; see specification as filed for detailed description of substitutions, R-groups and preferred embodiments
  MOD_RES (15)..(18): Any L- or D-natural or non-natural amino acid, and this range may encompass 1 or 4 residues; see specification as filed for detailed description of substitutions, R-groups and preferred embodiments
  c-term may be amidated
SPYSSDTXPXXFAXXXXXEKKWVREYINSLEMS

SEQ ID NO: 926 - protein, 33 aa, Artificial Sequence
  Description of Artificial Sequence: Synthetic peptide
  MOD_RES (9)..(11): Any L- or D-natural amino acid and any non-natural amino acid; see specification as filed for detailed description of substitutions, R-groups and preferred embodiments
  MOD_RES (14)..(14): Any L- or D-natural amino acid and any non-natural amino acid; see specification as filed for detailed description of substitutions, R-groups and preferred embodiments
  MOD_RES (15)..(18): Any L- or D-natural or non-natural amino acid, and this range may encompass 1 or 4 residues; see specification as filed for detailed description of substitutions, R-groups and preferred embodiments
  c-term may be amidated
SPYSSDTTXXXFAXXXXXEKKWVREYINSLEMS

SEQ ID NO: 927 - protein, 25 aa, Artificial Sequence
  Description of Artificial Sequence: Synthetic peptide
  c-term may be amidated
ACFAYIARPLPRAHIKEYFYTSGKC

SEQ ID NO: 928 - protein, 24 aa, Artificial Sequence
  Description of Artificial Sequence: Synthetic peptide
  c-term may be amidated
ECFAYIARPLPRAHIKEYFYTSGK

SEQ ID NO: 929 - protein, 24 aa, Artificial Sequence
  Description of Artificial Sequence: Synthetic peptide
  c-term may be amidated
ACFAYIARPLPRAHIKEYFYTSGK

SEQ ID NO: 930 - protein, 33 aa, Artificial Sequence; identical to SEQ ID NO: 885
  Description of Artificial Sequence: Synthetic peptide
  c-term may be amidated

SEQ ID NO: 931 - protein, 33 aa, Artificial Sequence
  Description of Artificial Sequence: Synthetic peptide
  MOD_RES (10)..(11): Any L- or D-natural amino acid and any non-natural amino acid; see specification as filed for detailed description of substitutions, R-groups and preferred embodiments
  c-term may be amidated
SPYSSDTTPXXFAYIARPLPRAHIKEYFYTSGK

SEQ ID NO: 932 - protein, 33 aa, Artificial Sequence; identical to SEQ ID NO: 887
  Description of Artificial Sequence: Synthetic peptide
  MOD_RES (15)..(18): Any L- or D-natural or non-natural amino acid, and this range may encompass 1 or 4 residues; see specification as filed for detailed description of substitutions, R-groups and preferred embodiments
  c-term may be amidated

SEQ ID NO: 933 - protein, 33 aa, Artificial Sequence; identical to SEQ ID NO: 888
  Description of Artificial Sequence: Synthetic peptide
  MOD_RES (1)..(1): Any L- or D-natural amino acid and any non-natural amino acid; see specification as filed for detailed description of substitutions, R-groups and preferred embodiments
  MOD_RES (10)..(11): Any L- or D-natural amino acid and any non-natural amino acid; see specification as filed for detailed description of substitutions, R-groups and preferred embodiments
  MOD_RES (15)..(18): Any L- or D-natural or non-natural amino acid, and this range may encompass 1 or 4 residues; see specification as filed for detailed description of substitutions, R-groups and preferred embodiments
  c-term may be amidated

SEQ ID NO: 934 - protein, 33 aa, Artificial Sequence; identical to SEQ ID NO: 889
  Description of Artificial Sequence: Synthetic peptide
  MOD_RES (2)..(2): Any L- or D-natural amino acid and any non-natural amino acid; see specification as filed for detailed description of substitutions, R-groups and preferred embodiments
  MOD_RES (10)..(11): Any L- or D-natural amino acid and any non-natural amino acid; see specification as filed for detailed description of substitutions, R-groups and preferred embodiments
  MOD_RES (15)..(18): Any L- or D-natural or non-natural amino acid, and this range may encompass 1 or 4 residues; see specification as filed for detailed description of substitutions, R-groups and preferred embodiments
  c-term may be amidated

SEQ ID NO: 935 - protein, 33 aa, Artificial Sequence; identical to SEQ ID NO: 890
  Description of Artificial Sequence: Synthetic peptide
  MOD_RES (3)..(3): Any L- or D-natural amino acid and any non-natural amino acid; see specification as filed for detailed description of substitutions, R-groups and preferred embodiments
  MOD_RES (10)..(11): Any L- or D-natural amino acid and any non-natural amino acid; see specification as filed for detailed description of substitutions, R-groups and preferred embodiments
  MOD_RES (15)..(18): Any L- or D-natural or non-natural amino acid, and this range may encompass 1 or 4 residues; see specification as filed for detailed description of substitutions, R-groups and preferred embodiments
  c-term may be amidated

SEQ ID NO: 936 - protein, 33 aa, Artificial Sequence; identical to SEQ ID NO: 891
  Description of Artificial Sequence: Synthetic peptide
  MOD_RES (4)..(4): Any L- or D-natural amino acid and any non-natural amino acid; see specification as filed for detailed description of substitutions, R-groups and preferred embodiments
  MOD_RES (10)..(11): Any L- or D-natural amino acid and any non-natural amino acid; see specification as filed for detailed description of substitutions, R-groups and preferred embodiments
  MOD_RES (15)..(18): Any L- or D-natural or non-natural amino acid, and this range may encompass 1 or 4 residues; see specification as filed for detailed description of substitutions, R-groups and preferred embodiments
  c-term may be amidated

SEQ ID NO: 937 - protein, 33 aa, Artificial Sequence; identical to SEQ ID NO: 892
  Description of Artificial Sequence: Synthetic peptide
  MOD_RES (5)..(5): Any L- or D-natural amino acid and any non-natural amino acid; see specification as filed for detailed description of substitutions, R-groups and preferred embodiments
  MOD_RES (10)..(11): Any L- or D-natural amino acid and any non-natural amino acid; see specification as filed for detailed description of substitutions, R-groups and preferred embodiments
  MOD_RES (15)..(18): Any L- or D-natural or non-natural amino acid, and this range may encompass 1 or 4 residues; see specification as filed for detailed description of substitutions, R-groups and preferred embodiments
  c-term may be amidated

SEQ ID NO: 938 - protein, 33 aa, Artificial Sequence; identical to SEQ ID NO: 893
  Description of Artificial Sequence: Synthetic peptide
  MOD_RES (6)..(6): Any L- or D-natural amino acid and any non-natural amino acid; see specification as filed for detailed description of substitutions, R-groups and preferred embodiments
  MOD_RES (10)..(11): Any L- or D-natural amino acid and any non-natural amino acid; see specification as filed for detailed description of substitutions, R-groups and preferred embodiments
  MOD_RES (15)..(18): Any L- or D-natural or non-natural amino acid, and this range may encompass 1 or 4 residues; see specification as filed for detailed description of substitutions, R-groups and preferred embodiments
  c-term may be amidated

SEQ ID NO: 939 - protein, 33 aa, Artificial Sequence; identical to SEQ ID NO: 894
  Description of Artificial Sequence: Synthetic peptide
  MOD_RES (7)..(7): Any L- or D-natural amino acid and any non-natural amino acid; see specification as filed for detailed description of substitutions, R-groups and preferred embodiments
  MOD_RES (10)..(11): Any L- or D-natural amino acid and any non-natural amino acid; see specification as filed for detailed description of substitutions, R-groups and preferred embodiments
  MOD_RES (15)..(18): Any L- or D-natural or non-natural amino acid, and this range may encompass 1 or 4 residues; see specification as filed for detailed description of substitutions, R-groups and preferred embodiments
  c-term may be amidated

SEQ ID NO: 940 - protein, 33 aa, Artificial Sequence; identical to SEQ ID NO: 895
  Description of Artificial Sequence: Synthetic peptide
  MOD_RES (8)..(8): Any L- or D-natural amino acid and any non-natural amino acid; see specification as filed for detailed description of substitutions, R-groups and preferred embodiments
  MOD_RES (10)..(11): Any L- or D-natural amino acid and any non-natural amino acid; see specification as filed for detailed description of substitutions, R-groups and preferred embodiments
  MOD_RES (15)..(18): Any L- or D-natural or non-natural amino acid, and this range may encompass 1 or 4 residues; see specification as filed for detailed description of substitutions, R-groups and preferred embodiments
  c-term may be amidated

SEQ ID NO: 941 - protein, 33 aa, Artificial Sequence; identical to SEQ ID NO: 896
  Description of Artificial Sequence: Synthetic peptide
  MOD_RES (9)..(11): Any L- or D-natural amino acid and any non-natural amino acid; see specification as filed for detailed description of substitutions, R-groups and preferred embodiments
  MOD_RES (15)..(18): Any L- or D-natural or non-natural amino acid, and this range may encompass 1 or 4 residues; see specification as filed for detailed description of substitutions, R-groups and preferred embodiments
  c-term may be amidated

SEQ ID NO: 942 - protein, 33 aa, Artificial Sequence; identical to SEQ ID NO: 897
  Description of Artificial Sequence: Synthetic peptide
  MOD_RES (12)..(12): Any L- or D-natural amino acid and any non-natural amino acid; see specification as filed for detailed description of substitutions, R-groups and preferred embodiments
  MOD_RES (15)..(18): Any L- or D-natural or non-natural amino acid, and this range may encompass 1 or 4 residues; see specification as filed for detailed description of substitutions, R-groups and preferred embodiments
  c-term may be amidated

SEQ ID NO: 943 - protein, 33 aa, Artificial Sequence; identical to SEQ ID NO: 898
  Description of Artificial Sequence: Synthetic peptide
  MOD_RES (1)..(1): Any L- or D-natural amino acid and any non-natural amino acid; see specification as filed for detailed description of substitutions, R-groups and preferred embodiments
  MOD_RES (10)..(12): Any L- or D-natural amino acid and any non-natural amino acid; see specification as filed for detailed description of substitutions, R-groups and preferred embodiments
  MOD_RES (15)..(18): Any L- or D-natural or non-natural amino acid, and this range may encompass 1 or 4 residues; see specification as filed for detailed description of substitutions, R-groups and preferred embodiments
  c-term may be amidated

SEQ ID NO: 944 - protein, 33 aa, Artificial Sequence; identical to SEQ ID NO: 899
  Description of Artificial Sequence: Synthetic peptide
  MOD_RES (2)..(2): Any L- or D-natural amino acid and any non-natural amino acid; see specification as filed for detailed description of substitutions, R-groups and preferred embodiments
  MOD_RES (10)..(12): Any L- or D-natural amino acid and any non-natural amino acid; see specification as filed for detailed description of substitutions, R-groups and preferred embodiments
  MOD_RES (15)..(18): Any L- or D-natural or non-natural amino acid, and this range may encompass 1 or 4 residues; see specification as filed for detailed description of substitutions, R-groups and preferred embodiments
  c-term may be amidated

SEQ ID NO: 945 - protein, 33 aa, Artificial Sequence; identical to SEQ ID NO: 900
  Description of Artificial Sequence: Synthetic peptide
  MOD_RES (3)..(3): Any L- or D-natural amino acid and any non-natural amino acid; see specification as filed for detailed description of substitutions, R-groups and preferred embodiments
  MOD_RES (10)..(12): Any L- or D-natural amino acid and any non-natural amino acid; see specification as filed for detailed description of substitutions, R-groups and preferred embodiments
  MOD_RES (15)..(18): Any L- or D-natural or non-natural amino acid, and this range may encompass 1 or 4 residues; see specification as filed for detailed description of substitutions, R-groups and preferred embodiments
  c-term may be amidated

SEQ ID NO: 946 - protein, 33 aa, Artificial Sequence; identical to SEQ ID NO: 901
  Description of Artificial Sequence: Synthetic peptide
  MOD_RES (4)..(4): Any L- or D-natural amino acid and any non-natural amino acid; see specification as filed for detailed description of substitutions, R-groups and preferred embodiments
  MOD_RES (10)..(12): Any L- or D-natural amino acid and any non-natural amino acid; see specification as filed for detailed description of substitutions, R-groups and preferred embodiments
  MOD_RES (15)..(18): Any L- or D-natural or non-natural amino acid, and this range may encompass 1 or 4 residues; see specification as filed for detailed description of substitutions, R-groups and preferred embodiments
  c-term may be amidated

SEQ ID NO: 947 - protein, 33 aa, Artificial Sequence; identical to SEQ ID NO: 902
  Description of Artificial Sequence: Synthetic peptide
  MOD_RES (5)..(5): Any L- or D-natural amino acid and any non-natural amino acid; see specification as filed for detailed description of substitutions, R-groups and preferred embodiments
  MOD_RES (10)..(12): Any L- or D-natural amino acid and any non-natural amino acid; see specification as filed for detailed description of substitutions, R-groups and preferred embodiments
  MOD_RES (15)..(18): Any L- or D-natural or non-natural amino acid, and this range may encompass 1 or 4 residues; see specification as filed for detailed description of substitutions, R-groups and preferred embodiments
  c-term may be amidated

SEQ ID NO: 948 - protein, 33 aa, Artificial Sequence; identical to SEQ ID NO: 903
  Description of Artificial Sequence: Synthetic peptide
  MOD_RES (6)..(6): Any L- or D-natural amino acid and any non-natural amino acid; see specification as filed for detailed description of substitutions, R-groups and preferred embodiments
  MOD_RES (10)..(12): Any L- or D-natural amino acid and any non-natural amino acid; see specification as filed for detailed description of substitutions, R-groups and preferred embodiments
  MOD_RES (15)..(18): Any L- or D-natural or non-natural amino acid, and this range may encompass 1 or 4 residues; see specification as filed for detailed description of substitutions, R-groups and preferred embodiments
  c-term may be amidated

SEQ ID NO: 949 - protein, 33 aa, Artificial Sequence; identical to SEQ ID NO: 904
  Description of Artificial Sequence: Synthetic peptide
  MOD_RES (7)..(7): Any L- or D-natural amino acid and any non-natural amino acid; see specification as filed for detailed description of substitutions, R-groups and preferred embodiments
  MOD_RES (10)..(12): Any L- or D-natural amino acid and any non-natural amino acid; see specification as filed for detailed description of substitutions, R-groups and preferred embodiments
  MOD_RES (15)..(18): Any L- or D-natural or non-natural amino acid, and this range may encompass 1 or 4 residues; see specification as filed for detailed description of substitutions, R-groups and preferred embodiments
  c-term may be amidated

SEQ ID NO: 950 - protein, 33 aa, Artificial Sequence; identical to SEQ ID NO: 905
  Description of Artificial Sequence: Synthetic peptide
  MOD_RES (8)..(8): Any L- or D-natural amino acid and any non-natural amino acid; see specification as filed for detailed description of substitutions, R-groups and preferred embodiments
  MOD_RES (10)..(12): Any L- or D-natural amino acid and any non-natural amino acid; see specification as filed for detailed description of substitutions, R-groups and preferred embodiments
  MOD_RES (15)..(18): Any L- or D-natural or non-natural amino acid, and this range may encompass 1 or 4 residues; see specification as filed for detailed description of substitutions, R-groups and preferred embodiments
  c-term may be amidated

SEQ ID NO: 951 - protein, 33 aa, Artificial Sequence; identical to SEQ ID NO: 906
  Description of Artificial Sequence: Synthetic peptide
  MOD_RES (9)..(12): Any L- or D-natural amino acid and any non-natural amino acid; see specification as filed for detailed description of substitutions, R-groups and preferred embodiments
  MOD_RES (15)..(18): Any L- or D-natural or non-natural amino acid, and this range may encompass 1 or 4 residues; see specification as filed for detailed description of substitutions, R-groups and preferred embodiments
  c-term may be amidated

SEQ ID NO: 952 - protein, 33 aa, Artificial Sequence; identical to SEQ ID NO: 907
  Description of Artificial Sequence: Synthetic peptide
  MOD_RES (13)..(13): Any L- or D-natural amino acid and any non-natural amino acid; see specification as filed for detailed description of substitutions, R-groups and preferred embodiments
  MOD_RES (15)..(18): Any L- or D-natural or non-natural amino acid, and this range may encompass 1 or 4 residues; see specification as filed for detailed description of substitutions, R-groups and preferred embodiments
  c-term may be amidated

SEQ ID NO: 953 - protein, 33 aa, Artificial Sequence; identical to SEQ ID NO: 908
  Description of Artificial Sequence: Synthetic peptide
  MOD_RES (1)..(1): Any L- or D-natural amino acid and any non-natural amino acid; see specification as filed for detailed description of substitutions, R-groups and preferred embodiments
  MOD_RES (10)..(11): Any L- or D-natural amino acid and any non-natural amino acid; see specification as filed for detailed description of substitutions, R-groups and preferred embodiments
  MOD_RES (13)..(13): Any L- or D-natural amino acid and any non-natural amino acid; see specification as filed for detailed description of substitutions, R-groups and preferred embodiments
  MOD_RES (15)..(18): Any L- or D-natural or non-natural amino acid, and this range may encompass 1 or 4 residues; see specification as filed for detailed description of substitutions, R-groups and preferred embodiments
  c-term may be amidated

SEQ ID NO: 954 - protein, 33 aa, Artificial Sequence; identical to SEQ ID NO: 909
  Description of Artificial Sequence: Synthetic peptide
  MOD_RES (2)..(2): Any L- or D-natural amino acid and any non-natural amino acid; see specification as filed for detailed description of substitutions, R-groups and preferred embodiments
  MOD_RES (10)..(11): Any L- or D-natural amino acid and any non-natural amino acid; see specification as filed for detailed description of substitutions, R-groups and preferred embodiments
  MOD_RES (13)..(13): Any L- or D-natural amino acid and any non-natural amino acid; see specification as filed for detailed description of substitutions, R-groups and preferred embodiments
  MOD_RES (15)..(18): Any L- or D-natural or non-natural amino acid, and this range may encompass 1 or 4 residues; see specification as filed for detailed description of substitutions, R-groups and preferred embodiments
  c-term may be amidated

SEQ ID NO: 955 - protein, 33 aa, Artificial Sequence; identical to SEQ ID NO: 910
  Description of Artificial Sequence: Synthetic peptide
  MOD_RES (3)..(3): Any L- or D-natural amino acid and any non-natural amino acid; see specification as filed for detailed description of substitutions, R-groups and preferred embodiments
  MOD_RES (10)..(11): Any L- or D-natural amino acid and any non-natural amino acid; see specification as filed for detailed description of substitutions, R-groups and preferred embodiments
  MOD_RES (13)..(13): Any L- or D-natural amino acid and any non-natural amino acid; see specification as filed for detailed description of substitutions, R-groups and preferred embodiments
  MOD_RES (15)..(18): Any L- or D-natural or non-natural amino acid, and this range may encompass 1 or 4 residues; see specification as filed for detailed description of substitutions, R-groups and preferred embodiments
  c-term may be amidated

SEQ ID NO: 956 - protein, 33 aa, Artificial Sequence; identical to SEQ ID NO: 911
  Description of Artificial Sequence: Synthetic peptide
  MOD_RES (4)..(4): Any L- or D-natural amino acid and any non-natural amino acid; see specification as filed for detailed description of substitutions, R-groups and preferred embodiments
  MOD_RES (10)..(11): Any L- or D-natural amino acid and any non-natural amino acid; see specification as filed for detailed description of substitutions, R-groups and preferred embodiments
  MOD_RES (13)..(13): Any L- or D-natural amino acid and any non-natural amino acid; see specification as filed for detailed description of substitutions, R-groups and preferred embodiments
  MOD_RES (15)..(18): Any L- or D-natural or non-natural amino acid, and this range may encompass 1 or 4 residues; see specification as filed for detailed description of substitutions, R-groups and preferred embodiments
  c-term may be amidated

SEQ ID NO: 957 - protein, 33 aa, Artificial Sequence; identical to SEQ ID NO: 912
  Description of Artificial Sequence: Synthetic peptide
  MOD_RES (5)..(5): Any L- or D-natural amino acid and any non-natural amino acid; see specification as filed for detailed description of substitutions, R-groups and preferred embodiments
  MOD_RES (10)..(11): Any L- or D-natural amino acid and any non-natural amino acid; see specification as filed for detailed description of substitutions, R-groups and preferred embodiments
  MOD_RES (13)..(13): Any L- or D-natural amino acid and any non-natural amino acid; see specification as filed for detailed description of substitutions, R-groups and preferred embodiments
  MOD_RES (15)..(18): Any L- or D-natural or non-natural amino acid, and this range may encompass 1 or 4 residues; see specification as filed for detailed description of substitutions, R-groups and preferred embodiments
  c-term may be amidated

SEQ ID NO: 958 - protein, 33 aa, Artificial Sequence; identical to SEQ ID NO: 913
  Description of Artificial Sequence: Synthetic peptide
  MOD_RES (6)..(6): Any L- or D-natural amino acid and any non-natural amino acid; see specification as filed for detailed description of substitutions, R-groups and preferred embodiments
  MOD_RES (10)..(11): Any L- or D-natural amino acid and any non-natural amino acid; see specification as filed for detailed description of substitutions, R-groups and preferred embodiments
  MOD_RES (13)..(13): Any L- or D-natural amino acid and any non-natural amino acid; see specification as filed for detailed description of substitutions, R-groups and preferred embodiments
  MOD_RES (15)..(18): Any L- or D-natural or non-natural amino acid, and this range may encompass 1 or 4 residues; see specification as filed for detailed description of substitutions, R-groups and preferred embodiments
  c-term may be amidated

SEQ ID NO: 959 - protein, 33 aa, Artificial Sequence; identical to SEQ ID NO: 914
  Description of Artificial Sequence: Synthetic peptide
  MOD_RES (7)..(7): Any L- or D-natural amino acid and any non-natural amino acid; see specification as filed for detailed description of substitutions, R-groups and preferred embodiments
  MOD_RES (10)..(11): Any L- or D-natural amino acid and any non-natural amino acid; see specification as filed for detailed description of substitutions, R-groups and preferred embodiments
  MOD_RES (13)..(13): Any L- or D-natural amino acid and any non-natural amino acid; see specification as filed for detailed description of substitutions, R-groups and preferred embodiments
  MOD_RES (15)..(18): Any L- or D-natural or non-natural amino acid, and this range may encompass 1 or 4 residues; see specification as filed for detailed description of substitutions, R-groups and preferred embodiments
  c-term may be amidated

SEQ ID NO: 960 - protein, 33 aa, Artificial Sequence; identical to SEQ ID NO: 915
  Description of Artificial Sequence: Synthetic peptide
  MOD_RES (8)..(8): Any L- or D-natural amino acid and any non-natural amino acid; see specification as filed for detailed description of substitutions, R-groups and preferred embodiments
  MOD_RES (10)..(11): Any L- or D-natural amino acid and any non-natural amino acid; see specification as filed for detailed description of substitutions, R-groups and preferred embodiments
  MOD_RES (13)..(13): Any L- or D-natural amino acid and any non-natural amino acid; see specification as filed for detailed description of substitutions, R-groups and preferred embodiments
  MOD_RES (15)..(18): Any L- or D-natural or non-natural amino acid, and this range may encompass 1 or 4 residues; see specification as filed for detailed description of substitutions, R-groups and preferred embodiments
  c-term may be amidated

SEQ ID NO: 961 - protein, 33 aa, Artificial Sequence; identical to SEQ ID NO: 916
  Description of Artificial Sequence: Synthetic peptide
  MOD_RES (9)..(11): Any L- or D-natural amino acid and any non-natural amino acid; see specification as filed for detailed description of substitutions, R-groups and preferred embodiments
  MOD_RES (13)..(13): Any L- or D-natural amino acid and any non-natural amino acid; see specification as filed for detailed description of substitutions, R-groups and preferred embodiments
  MOD_RES (15)..(18): Any L- or D-natural or non-natural amino acid, and this range may encompass 1 or 4 residues; see specification as filed for detailed description of substitutions, R-groups and preferred embodiments
  c-term may be amidated

SEQ ID NO: 962 - protein, 33 aa, Artificial Sequence; identical to SEQ ID NO: 917
  Description of Artificial Sequence: Synthetic peptide
  MOD_RES (14)..(14): Any L- or D-natural amino acid and any non-natural amino acid; see specification as filed for detailed description of substitutions, R-groups and preferred embodiments
  MOD_RES (15)..(18): Any L- or D-natural or non-natural amino acid, and this range may encompass 1 or 4 residues; see specification as filed for detailed description of substitutions, R-groups and preferred embodiments
  c-term may be amidated

SEQ ID NO: 963 - protein, 33 aa, Artificial Sequence; identical to SEQ ID NO: 918
  Description of Artificial Sequence: Synthetic peptide
  MOD_RES (1)..(1): Any L- or D-natural amino acid and any non-natural amino acid; see specification as filed for detailed description of substitutions, R-groups and preferred embodiments
  MOD_RES (10)..(11): Any L- or D-natural amino acid and any non-natural amino acid; see specification as filed for detailed description of substitutions, R-groups and preferred embodiments
  MOD_RES (14)..(14): Any L- or D-natural amino acid and any non-natural amino acid; see specification as filed for detailed description of substitutions, R-groups and preferred embodiments
  MOD_RES (15)..(18): Any L- or D-natural or non-natural amino acid, and this range may encompass 1 or 4 residues; see specification as filed for detailed description of substitutions, R-groups and preferred embodiments
  c-term may be amidated

SEQ ID NO: 964 - protein, 33 aa, Artificial Sequence; identical to SEQ ID NO: 919
  Description of Artificial Sequence: Synthetic peptide
  MOD_RES (2)..(2): Any L- or D-natural amino acid and any non-natural amino acid; see specification as filed for detailed description of substitutions, R-groups and preferred embodiments
  MOD_RES (10)..(11): Any L- or D-natural amino acid and any non-natural amino acid; see specification as filed for detailed description of substitutions, R-groups and preferred embodiments
  MOD_RES (14)..(14): Any L- or D-natural amino acid and any non-natural amino acid; see specification as filed for detailed description of substitutions, R-groups and preferred embodiments
  MOD_RES (15)..(18): Any L- or D-natural or non-natural amino acid, and this range may encompass 1 or 4 residues; see specification as filed for detailed description of substitutions, R-groups and preferred embodiments
  c-term may be amidated

SEQ ID NO: 965 - protein, 33 aa, Artificial Sequence; identical to SEQ ID NO: 920
  Description of Artificial Sequence: Synthetic peptide
  MOD_RES (3)..(3): Any L- or D-natural amino acid and any non-natural amino acid; see specification as filed for detailed description of substitutions, R-groups and preferred embodiments
  MOD_RES (10)..(11): Any L- or D-natural amino acid and any non-natural amino acid; see specification as filed for detailed description of substitutions, R-groups and preferred embodiments
  MOD_RES (14)..(14): Any L- or D-natural amino acid and any non-natural amino acid; see specification as filed for detailed description of substitutions, R-groups and preferred embodiments
  MOD_RES (15)..(18): Any L- or D-natural or non-natural amino acid, and this range may encompass 1 or 4 residues; see specification as filed for detailed description of substitutions, R-groups and preferred embodiments
  c-term may be amidated

SEQ ID NO: 966 - protein, 33 aa, Artificial Sequence; identical to SEQ ID NO: 921
  Description of Artificial Sequence: Synthetic peptide
  MOD_RES (4)..(4): Any L- or D-natural amino acid and any non-natural amino acid; see specification as filed for detailed description of substitutions, R-groups and preferred embodiments
  MOD_RES (10)..(11): Any L- or D-natural amino acid and any non-natural amino acid; see specification as filed for detailed description of substitutions, R-groups and preferred embodiments
  MOD_RES (14)..(14): Any L- or D-natural amino acid and any non-natural amino acid; see specification as filed for detailed description of substitutions, R-groups and preferred embodiments
  MOD_RES (15)..(18): Any L- or D-natural or non-natural amino acid, and this range may encompass 1 or 4 residues; see specification as filed for detailed description of substitutions, R-groups and preferred embodiments
  c-term may be amidated

SEQ ID NO: 967 - protein, 33 aa, Artificial Sequence; identical to SEQ ID NO: 922
  Description of Artificial Sequence: Synthetic peptide
  MOD_RES (5)..(5): Any L- or D-natural amino acid and any non-natural amino acid; see specification as filed for detailed description of substitutions, R-groups and preferred embodiments
  MOD_RES (10)..(11): Any L- or D-natural amino acid and any non-natural amino acid; see specification as filed for detailed description of substitutions, R-groups and preferred embodiments
  MOD_RES (14)..(14): Any L- or D-natural amino acid and any non-natural amino acid; see specification as filed for detailed description of substitutions, R-groups and preferred embodiments
  MOD_RES (15)..(18): Any L- or D-natural or non-natural amino acid, and this range may encompass 1 or 4 residues; see specification as filed for detailed description of substitutions, R-groups and preferred embodiments
  c-term may be amidated

SEQ ID NO: 968 - protein, 33 aa, Artificial Sequence; identical to SEQ ID NO: 923
  Description of Artificial Sequence: Synthetic peptide
  MOD_RES (6)..(6): Any L- or D-natural amino acid and any non-natural amino acid; see specification as filed for detailed description of substitutions, R-groups and preferred embodiments
  MOD_RES (10)..(11): Any L- or D-natural amino acid and any non-natural amino acid; see specification as filed for detailed description of substitutions, R-groups and preferred embodiments
  MOD_RES (14)..(14): Any L- or D-natural amino acid and any non-natural amino acid; see specification as filed for detailed description of substitutions, R-groups and preferred embodiments
  MOD_RES (15)..(18): Any L- or D-natural or non-natural amino acid, and this range may encompass 1 or 4 residues; see specification as filed for detailed description of substitutions, R-groups and preferred embodiments
  c-term may be amidated

SEQ ID NO: 969 - protein, 33 aa, Artificial Sequence; identical to SEQ ID NO: 924
  Description of Artificial Sequence: Synthetic peptide
  MOD_RES (7)..(7): Any L- or D-natural amino acid and any non-natural amino acid; see specification as filed for detailed description of substitutions, R-groups and preferred embodiments
  MOD_RES (10)..(11): Any L- or D-natural amino acid and any non-natural amino acid; see specification as filed for detailed description of substitutions, R-groups and preferred embodiments
  MOD_RES (14)..(14): Any L- or D-natural amino acid and any non-natural amino acid; see specification as filed for detailed description of substitutions, R-groups and preferred embodiments
  MOD_RES (15)..(18): Any L- or D-natural or non-natural amino acid, and this range may encompass 1 or 4 residues; see specification as filed for detailed description of substitutions, R-groups and preferred embodiments
  c-term may be amidated

SEQ ID NO: 970 - protein, 33 aa, Artificial Sequence; identical to SEQ ID NO: 925
  Description of Artificial Sequence: Synthetic peptide
  MOD_RES (8)..(8): Any L- or D-natural amino acid and any non-natural amino acid; see specification as filed for detailed description of substitutions, R-groups and preferred embodiments
  MOD_RES (10)..(11): Any L- or D-natural amino acid and any non-natural amino acid; see specification as filed for detailed description of substitutions, R-groups and preferred embodiments
  MOD_RES (14)..(14): Any L- or D-natural amino acid and any non-natural amino acid; see specification as filed for detailed description of substitutions, R-groups and preferred embodiments
  MOD_RES (15)..(18): Any L- or D-natural or non-natural amino acid, and this range may encompass 1 or 4 residues; see specification as filed for detailed description of substitutions, R-groups and preferred embodiments
  c-term may be amidated

SEQ ID NO: 971 - protein, 33 aa, Artificial Sequence; identical to SEQ ID NO: 926
  Description of Artificial Sequence: Synthetic peptide
  MOD_RES (9)..(11): Any L- or D-natural amino acid and any non-natural amino acid; see specification as filed for detailed description of substitutions, R-groups and preferred embodiments
  MOD_RES (14)..(14): Any L- or D-natural amino acid and any non-natural amino acid; see specification as filed for detailed description of substitutions, R-groups and preferred embodiments
  MOD_RES (15)..(18): Any L- or D-natural or non-natural amino acid, and this range may encompass 1 or 4 residues; see specification as filed for detailed description of substitutions, R-groups and preferred embodiments
  c-term may be amidated

SEQ ID NO: 972 - protein, 10 aa, Artificial Sequence
  Description of Artificial Sequence: Synthetic peptide
  c-term may be amidated
KSMQVPFSRA

SEQ ID NO: 973 - protein, 15 aa, Artificial Sequence
  Description of Artificial Sequence: Synthetic peptide
  c-term may be amidated
AFSFAEQEIPLRAIL

SEQ ID NO: 974 - protein, 23 aa, Artificial Sequence
  Description of Artificial Sequence: Synthetic peptide
  c-term may be amidated
AFSFAEQEIPLRAILCYRNTSSI

SEQ ID NO: 975 - protein, 24 aa, Artificial Sequence
  Description of Artificial Sequence: Synthetic peptide
  c-term may be amidated
AYRNTSSICSNEGLIFKLKRGKEA

SEQ ID NO: 976 - protein, 25 aa, Artificial Sequence
  Description of Artificial Sequence: Synthetic peptide
  c-term may be amidated
KSMQVPFSRCCFSFAEQEIPLRAIL

SEQ ID NO: 977 - protein, 25 aa, Artificial Sequence
  Description of Artificial Sequence: Synthetic peptide
  MOD_RES (10)..(11): Any L- or D-natural amino acid and any non-natural amino acid; see specification as filed for detailed description of substitutions, R-groups and preferred embodiments
  c-term may be amidated
KSMQVPFSRXXFSFAEQEIPLRAIL

SEQ ID NO: 978 - protein, 25 aa, Artificial Sequence
  Description of Artificial Sequence: Synthetic peptide
  MOD_RES (1)..(1): Any L- or D-natural amino acid and any non-natural amino acid; see specification as filed for detailed description of substitutions, R-groups and preferred embodiments
  MOD_RES (10)..(11): Any L- or D-natural amino acid and any non-natural amino acid; see specification as filed for detailed description of substitutions, R-groups and preferred embodiments
  c-term may be amidated
XSMQVPFSRXXFSFAEQEIPLRAIL

SEQ ID NO: 979 - protein, 25 aa, Artificial Sequence
  Description of Artificial Sequence: Synthetic peptide
  MOD_RES (2)..(2): Any L- or D-natural amino acid and any non-natural amino acid; see specification as filed for detailed description of substitutions, R-groups and preferred embodiments
  MOD_RES (10)..(11): Any L- or D-natural amino acid and any non-natural amino acid; see specification as filed for detailed description of substitutions, R-groups and preferred embodiments
  c-term may be amidated
KXMQVPFSRXXFSFAEQEIPLRAIL

SEQ ID NO: 980 - protein, 25 aa, Artificial Sequence
  Description of Artificial Sequence: Synthetic peptide
  MOD_RES (3)..(3): Any L- or D-natural amino acid and any non-natural amino acid; see specification as filed for detailed description of substitutions, R-groups and preferred embodiments
  MOD_RES (10)..(11): Any L- or D-natural amino acid and any non-natural amino acid; see specification as filed for detailed description of substitutions, R-groups and preferred embodiments
  c-term may be amidated
KSXQVPFSRXXFSFAEQEIPLRAIL

SEQ ID NO: 981 - protein, 25 aa, Artificial Sequence
  Description of Artificial Sequence: Synthetic peptide
  MOD_RES (4)..(4): Any L- or D-natural amino acid and any non-natural amino acid; see specification as filed for detailed description of substitutions, R-groups and preferred embodiments
  MOD_RES (10)..(11): Any L- or D-natural amino acid and any non-natural amino acid; see specification as filed for detailed description of substitutions, R-groups and preferred embodiments
  c-term may be amidated
KSMXVPFSRXXFSFAEQEIPLRAIL

SEQ ID NO: 982 - protein, 25 aa, Artificial Sequence
  Description of Artificial Sequence: Synthetic peptide
  MOD_RES (5)..(5): Any L- or D-natural amino acid and any non-natural amino acid; see specification as filed for detailed description of substitutions, R-groups and preferred embodiments
  MOD_RES (10)..(11): Any L- or D-natural amino acid and any non-natural amino acid; see specification as filed for detailed description of substitutions, R-groups and preferred embodiments
  c-term may be amidated
KSMQXPFSRXXFSFAEQEIPLRAIL

SEQ ID NO: 983 - protein, 25 aa, Artificial Sequence
  Description of Artificial Sequence: Synthetic peptide
  MOD_RES (6)..(6): Any L- or D-natural amino acid and any non-natural amino acid; see specification as filed for detailed description of substitutions, R-groups and preferred embodiments
  MOD_RES (10)..(11): Any L- or D-natural amino acid and any non-natural amino acid; see specification as filed for detailed description of substitutions, R-groups and preferred embodiments
  c-term may be amidated
KSMQVXFSRXXFSFAEQEIPLRAIL

SEQ ID NO: 984 - protein, 25 aa, Artificial Sequence
  Description of Artificial Sequence: Synthetic peptide
  MOD_RES (7)..(7): Any L- or D-natural amino acid and any non-natural amino acid; see specification as filed for detailed description of substitutions, R-groups and preferred embodiments
  MOD_RES (10)..(11): Any L- or D-natural amino acid and any non-natural amino acid; see specification as filed for detailed description of substitutions, R-groups and preferred embodiments
  c-term may be amidated
KSMQVPXSRXXFSFAEQEIPLRAIL

SEQ ID NO: 985 - protein, 25 aa, Artificial Sequence
  Description of Artificial Sequence: Synthetic peptide
  MOD_RES (8)..(8): Any L- or D-natural amino acid and any non-natural amino acid; see specification as filed for detailed description of substitutions, R-groups and preferred embodiments
  MOD_RES (10)..(11): Any L- or D-natural amino acid and any non-natural amino acid; see specification as filed for detailed description of substitutions, R-groups and preferred embodiments
  c-term may be amidated
KSMQVPFXRXXFSFAEQEIPLRAIL

SEQ ID NO: 986 - protein, 25 aa, Artificial Sequence
  Description of Artificial Sequence: Synthetic peptide
  MOD_RES (9)..(11): Any L- or D-natural amino acid and any non-natural amino acid; see specification as filed for detailed description of substitutions, R-groups and preferred embodiments
  c-term may be amidated
KSMQVPFSXXXFSFAEQEIPLRAIL

SEQ ID NO: 987 - protein, 34 aa, Artificial Sequence
  Description of Artificial Sequence: Synthetic peptide
  c-term may be amidated
ASNEGLIFKLKRGKEACALDTVGWVQRHRKMLRH

SEQ ID NO: 988 - protein, 24 aa, Artificial Sequence
  Description of Artificial Sequence: Synthetic peptide
  c-term may be amidated
AALDTVGWVQRHRKMLRHCPSKRK

SEQ ID NO: 989 - protein, 31 aa, Artificial Sequence
  Description of Artificial Sequence: Synthetic peptide
  MOD_RES (15)..(18): Any L- or D-natural or non-natural amino acid, and this range may encompass 1 or 4 residues; see specification as filed for detailed description of substitutions, R-groups and preferred embodiments
  c-term may be amidated
KSMQVPFSRCCFSFXXXXTVGWVQRHRKMLR

SEQ ID NO: 990 - protein, 31 aa, Artificial Sequence
  Description of Artificial Sequence: Synthetic peptide
  MOD_RES (10)..(11): Any L- or D-natural amino acid and any non-natural amino acid; see specification as filed for detailed description of substitutions, R-groups and preferred embodiments
  MOD_RES (15)..(18): Any L- or D-natural or non-natural amino acid, and this range may encompass 1 or 4 residues; see specification as filed for detailed description of substitutions, R-groups and preferred embodiments
  c-term may be amidated
KSMQVPFSRXXFSFXXXXTVGWVQRHRKMLR

SEQ ID NO: 991 - protein, 31 aa, Artificial Sequence
  Description of Artificial Sequence: Synthetic peptide
  MOD_RES (1)..(1): Any L- or D-natural amino acid and any non-natural amino acid; see specification as filed for detailed description of substitutions, R-groups and preferred embodiments
  MOD_RES (10)..(11): Any L- or D-natural amino acid and any non-natural amino acid; see specification as filed for detailed description of substitutions, R-groups and preferred embodiments
  MOD_RES (15)..(18): Any L- or D-natural or non-natural amino acid, and this range may encompass 1 or 4 residues; see specification as filed for detailed description of substitutions, R-groups and preferred embodiments
  c-term may be amidated
XSMQVPFSRXXFSFXXXXTVGWVQRHRKMLR

SEQ ID NO: 992 - protein, 31 aa, Artificial Sequence
  Description of Artificial Sequence: Synthetic peptide
  MOD_RES (2)..(2): Any L- or D-natural amino acid and any non-natural amino acid; see specification as filed for detailed description of substitutions, R-groups and preferred embodiments
  MOD_RES (10)..(11): Any L- or D-natural amino acid and any non-natural amino acid; see specification as filed for detailed description of substitutions, R-groups and preferred embodiments
  MOD_RES (15)..(18): Any L- or D-natural or non-natural amino acid, and this range may encompass 1 or 4 residues; see specification as filed for detailed description of substitutions, R-groups and preferred embodiments
  c-term may be amidated
KXMQVPFSRXXFSFXXXXTVGWVQRHRKMLR

SEQ ID NO: 993 - protein, 31 aa, Artificial Sequence
  Description of Artificial Sequence: Synthetic peptide
  MOD_RES (3)..(3): Any L- or D-natural amino acid and any non-natural amino acid; see specification as filed for detailed description of substitutions, R-groups and preferred embodiments
  MOD_RES (10)..(11): Any L- or D-natural amino acid and any non-natural amino acid; see specification as filed for detailed description of substitutions, R-groups and preferred embodiments
  MOD_RES (15)..(18): Any L- or D-natural or non-natural amino acid, and this range may encompass 1 or 4 residues; see specification as filed for detailed description of substitutions, R-groups and preferred embodiments
  c-term may be amidated
KSXQVPFSRXXFSFXXXXTVGWVQRHRKMLR

SEQ ID NO: 994 - protein, 31 aa, Artificial Sequence
  Description of Artificial Sequence: Synthetic peptide
  MOD_RES (4)..(4): Any L- or D-natural amino acid and any non-natural amino acid; see specification as filed for detailed description of substitutions, R-groups and preferred embodiments
  MOD_RES (10)..(11): Any L- or D-natural amino acid and any non-natural amino acid; see specification as filed for detailed description of substitutions, R-groups and preferred embodiments
  MOD_RES (15)..(18): Any L- or D-natural or non-natural amino acid, and this range may encompass 1 or 4 residues; see specification as filed for detailed description of substitutions, R-groups and preferred embodiments
  c-term may be amidated
KSMXVPFSRXXFSFXXXXTVGWVQRHRKMLR

SEQ ID NO: 995 - protein, 31 aa, Artificial Sequence
  Description of Artificial Sequence: Synthetic peptide
  MOD_RES (5)..(5): Any L- or D-natural amino acid and any non-natural amino acid; see specification as filed for detailed description of substitutions, R-groups and preferred embodiments
  MOD_RES (10)..(11): Any L- or D-natural amino acid and any non-natural amino acid; see specification as filed for detailed description of substitutions, R-groups and preferred embodiments
  MOD_RES (15)..(18): Any L- or D-natural or non-natural amino acid, and this range may encompass 1 or 4 residues; see specification as filed for detailed description of substitutions, R-groups and preferred embodiments
  c-term may be amidated
KSMQXPFSRXXFSFXXXXTVGWVQRHRKMLR

SEQ ID NO: 996 - protein, 31 aa, Artificial Sequence
  Description of Artificial Sequence: Synthetic peptide
  MOD_RES (6)..(6): Any L- or D-natural amino acid and any non-natural amino acid; see specification as filed for detailed description of substitutions, R-groups and preferred embodiments
  MOD_RES (10)..(11): Any L- or D-natural amino acid and any non-natural amino acid; see specification as filed for detailed description of substitutions, R-groups and preferred embodiments
  MOD_RES (15)..(18): Any L- or D-natural or non-natural amino acid, and this range may encompass 1 or 4 residues; see specification as filed for detailed description of substitutions, R-groups and preferred embodiments
  c-term may be amidated
KSMQVXFSRXXFSFXXXXTVGWVQRHRKMLR

SEQ ID NO: 997 - protein, 31 aa, Artificial Sequence
  Description of Artificial Sequence: Synthetic peptide
  MOD_RES (7)..(7): Any L- or D-natural amino acid and any non-natural amino acid; see specification as filed for detailed description of substitutions, R-groups and preferred embodiments
  MOD_RES (10)..(11): Any L- or D-natural amino acid and any non-natural amino acid; see specification as filed for detailed description of substitutions, R-groups and preferred embodiments
  MOD_RES (15)..(18): Any L- or D-natural or non-natural amino acid, and this range may encompass 1 or 4 residues; see specification as filed for detailed description of substitutions, R-groups and preferred embodiments
  c-term may be amidated
KSMQVPXSRXXFSFXXXXTVGWVQRHRKMLR

SEQ ID NO: 998 - protein, 31 aa, Artificial Sequence
  Description of Artificial Sequence: Synthetic peptide
  MOD_RES (8)..(8): Any L- or D-natural amino acid and any non-natural amino acid; see specification as filed for detailed description of substitutions, R-groups and preferred embodiments
  MOD_RES (10)..(11): Any L- or D-natural amino acid and any non-natural amino acid; see specification as filed for detailed description of substitutions, R-groups and preferred embodiments
  MOD_RES (15)..(18): Any L- or D-natural or non-natural amino acid, and this range may encompass 1 or 4 residues; see specification as filed for detailed description of substitutions, R-groups and preferred embodiments
  c-term may be amidated
KSMQVPFXRXXFSFXXXXTVGWVQRHRKMLR

SEQ ID NO: 999 - protein, 31 aa, Artificial Sequence
  Description of Artificial Sequence: Synthetic peptide
  MOD_RES (9)..(11): Any L- or D-natural amino acid and any non-natural amino acid; see specification as filed for detailed description of substitutions, R-groups and preferred embodiments
  MOD_RES (15)..(18): Any L- or D-natural or non-natural amino acid, and this range may encompass 1 or 4 residues; see specification as filed for detailed description of substitutions, R-groups and preferred embodiments
  c-term may be amidated
KSMQVPFSXXXFSFXXXXTVGWVQRHRKMLR

SEQ ID NO: 1000 - protein, 31 aa, Artificial Sequence
  Description of Artificial Sequence: Synthetic peptide
  MOD_RES (12)..(12): Any L- or D-natural amino acid and any non-natural amino acid; see specification as filed for detailed description of substitutions, R-groups and preferred embodiments
  MOD_RES (15)..(18): Any L- or D-natural or non-natural amino acid, and this range may encompass 1 or 4 residues; see specification as filed for detailed description of substitutions, R-groups and preferred embodiments
  c-term may be amidated
KSMQVPFSRCCXSFXXXXTVGWVQRHRKMLR

SEQ ID NO: 1001 - protein, 31 aa, Artificial Sequence
  Description of Artificial Sequence: Synthetic peptide
  MOD_RES (10)..(12): Any L- or D-natural amino acid and any non-natural amino acid; see specification as filed for detailed description of substitutions, R-groups and preferred embodiments
  MOD_RES (15)..(18): Any L- or D-natural or non-natural amino acid, and this range may encompass 1 or 4 residues; see specification as filed for detailed description of substitutions, R-groups and preferred embodiments
  c-term may be amidated
KSMQVPFSRXXXSFXXXXTVGWVQRHRKMLR

SEQ ID NO: 1002 - protein, 31 aa, Artificial Sequence
  Description of Artificial Sequence: Synthetic peptide
  MOD_RES (1)..(1): Any L- or D-natural amino acid and any non-natural amino acid; see specification as filed for detailed description of substitutions, R-groups and preferred embodiments
  MOD_RES (10)..(12): Any L- or D-natural amino acid and any non-natural amino acid; see specification as filed for detailed description of substitutions, R-groups and preferred embodiments
  MOD_RES (15)..(18): Any L- or D-natural or non-natural amino acid, and this range may encompass 1 or 4 residues; see specification as filed for detailed description of substitutions, R-groups and preferred embodiments
  c-term may be amidated
XSMQVPFSRXXXSFXXXXTVGWVQRHRKMLR

SEQ ID NO: 1003 - protein, 31 aa, Artificial Sequence
  Description of Artificial Sequence: Synthetic peptide
  MOD_RES (2)..(2): Any L- or D-natural amino acid and any non-natural amino acid; see specification as filed for detailed description of substitutions, R-groups and preferred embodiments
  MOD_RES (10)..(12): Any L- or D-natural amino acid and any non-natural amino acid; see specification as filed for detailed description of substitutions, R-groups and preferred embodiments
  MOD_RES (15)..(18): Any L- or D-natural or non-natural amino acid, and this range may encompass 1 or 4 residues; see specification as filed for detailed description of substitutions, R-groups and preferred embodiments
  c-term may be amidated
KXMQVPFSRXXXSFXXXXTVGWVQRHRKMLR

SEQ ID NO: 1004 - protein, 31 aa, Artificial Sequence
  Description of Artificial Sequence: Synthetic peptide
  MOD_RES (3)..(3): Any L- or D-natural amino acid and any non-natural amino acid; see specification as filed for detailed description of substitutions, R-groups and preferred embodiments
  MOD_RES (10)..(12): Any L- or D-natural amino acid and any non-natural amino acid; see specification as filed for detailed description of substitutions, R-groups and preferred embodiments
  MOD_RES (15)..(18): Any L- or D-natural or non-natural amino acid, and this range may encompass 1 or 4 residues; see specification as filed for detailed description of substitutions, R-groups and preferred embodiments
  c-term may be amidated
KSXQVPFSRXXXSFXXXXTVGWVQRHRKMLR

SEQ ID NO: 1005 - protein, 31 aa, Artificial Sequence
  Description of Artificial Sequence: Synthetic peptide
  MOD_RES (4)..(4): Any L- or D-natural amino acid and any non-natural amino acid; see specification as filed for detailed description of substitutions, R-groups and preferred embodiments
  MOD_RES (10)..(12): Any L- or D-natural amino acid and any non-natural amino acid; see specification as filed for detailed description of substitutions, R-groups and preferred embodiments
  MOD_RES (15)..(18): Any L- or D-natural or non-natural amino acid, and this range may encompass 1 or 4 residues; see specification as filed for detailed description of substitutions, R-groups and preferred embodiments
  c-term may be amidated
KSMXVPFSRXXXSFXXXXTVGWVQRHRKMLR

SEQ ID NO: 1006 - protein, 31 aa, Artificial Sequence
  Description of Artificial Sequence: Synthetic peptide
  MOD_RES (5)..(5): Any L- or D-natural amino acid and any non-natural amino acid; see specification as filed for detailed description of substitutions, R-groups and preferred embodiments
  MOD_RES (10)..(12): Any L- or D-natural amino acid and any non-natural amino acid; see specification as filed for detailed description of substitutions, R-groups and preferred embodiments
  MOD_RES (15)..(18): Any L- or D-natural or non-natural amino acid, and this range may encompass 1 or 4 residues; see specification as filed for detailed description of substitutions, R-groups and preferred embodiments
  c-term may be amidated
KSMQXPFSRXXXSFXXXXTVGWVQRHRKMLR

SEQ ID NO: 1007 - protein, 31 aa, Artificial Sequence
  Description of Artificial Sequence: Synthetic peptide
  MOD_RES (6)..(6): Any L- or D-natural amino acid and any non-natural amino acid; see specification as filed for detailed description of substitutions, R-groups and preferred embodiments
  MOD_RES (10)..(12): Any L- or D-natural amino acid and any non-natural amino acid; see specification as filed for detailed description of substitutions, R-groups and preferred embodiments
  MOD_RES (15)..(18): Any L- or D-natural or non-natural amino acid, and this range may encompass 1 or 4 residues; see specification as filed for detailed description of substitutions, R-groups and preferred embodiments
  c-term may be amidated
KSMQVXFSRXXXSFXXXXTVGWVQRHRKMLR

SEQ ID NO: 1008 - protein, 31 aa, Artificial Sequence
  Description of Artificial Sequence: Synthetic peptide
  MOD_RES (7)..(7): Any L- or D-natural amino acid and any non-natural amino acid; see specification as filed for detailed description of substitutions, R-groups and preferred embodiments
  MOD_RES (10)..(12): Any L- or D-natural amino acid and any non-natural amino acid; see specification as filed for detailed description of substitutions, R-groups and preferred embodiments
  MOD_RES (15)..(18): Any L- or D-natural or non-natural amino acid, and this range may encompass 1 or 4 residues; see specification as filed for detailed description of substitutions, R-groups and preferred embodiments
  c-term may be amidated
KSMQVPXSRXXXSFXXXXTVGWVQRHRKMLR

SEQ ID NO: 1009 - protein, 31 aa, Artificial Sequence
  Description of Artificial Sequence: Synthetic peptide
  MOD_RES (8)..(8): Any L- or D-natural amino acid and any non-natural amino acid; see specification as filed for detailed description of substitutions, R-groups and preferred embodiments
  MOD_RES (10)..(12): Any L- or D-natural amino acid and any non-natural amino acid; see specification as filed for detailed description of substitutions, R-groups and preferred embodiments
  MOD_RES (15)..(18): Any L- or D-natural or non-natural amino acid, and this range may encompass 1 or 4 residues; see specification as filed for detailed description of substitutions, R-groups and preferred embodiments
  c-term may be amidated
KSMQVPFXRXXXSFXXXXTVGWVQRHRKMLR

SEQ ID NO: 1010 - protein, 31 aa, Artificial Sequence
  Description of Artificial Sequence: Synthetic peptide
  MOD_RES (9)..(12): Any L- or D-natural amino acid and any non-natural amino acid; see specification as filed for detailed description of substitutions, R-groups and preferred embodiments
  MOD_RES (15)..(18): Any L- or D-natural or non-natural amino acid, and this range may encompass 1 or 4 residues; see specification as filed for detailed description of substitutions, R-groups and preferred embodiments
  c-term may be amidated
KSMQVPFSXXXXSFXXXXTVGWVQRHRKMLR

SEQ ID NO: 1011 - protein, 31 aa, Artificial Sequence
  Description of Artificial Sequence: Synthetic peptide
  MOD_RES (13)..(13): Any L- or D-natural amino acid and any non-natural amino acid; see specification as filed for detailed description of substitutions, R-groups and preferred embodiments
  MOD_RES (15)..(18): Any L- or D-natural or non-natural amino acid, and this range may encompass 1 or 4 residues; see specification as filed for detailed description of substitutions, R-groups and preferred embodiments
  c-term may be amidated
KSMQVPFSRCCFXFXXXXTVGWVQRHRKMLR

SEQ ID NO: 1012 - protein, 31 aa, Artificial Sequence
  Description of Artificial Sequence: Synthetic peptide
  MOD_RES (10)..(11): Any L- or D-natural amino acid and any non-natural amino acid; see specification as filed for detailed description of substitutions, R-groups and preferred embodiments
  MOD_RES (13)..(13): Any L- or D-natural amino acid and any non-natural amino acid; see specification as filed for detailed description of substitutions, R-groups and preferred embodiments
  MOD_RES (15)..(18): Any L- or D-natural or non-natural amino acid, and this range may encompass 1 or 4 residues; see specification as filed for detailed description of substitutions, R-groups and preferred embodiments
  c-term may be amidated
KSMQVPFSRXXFXFXXXXTVGWVQRHRKMLR

SEQ ID NO: 1013 - protein, 31 aa, Artificial Sequence
  Description of Artificial Sequence: Synthetic peptide
  MOD_RES (1)..(1): Any L- or D-natural amino acid and any non-natural amino acid; see specification as filed for detailed description of substitutions, R-groups and preferred embodiments
  MOD_RES (10)..(11): Any L- or D-natural amino acid and any non-natural amino acid; see specification as filed for detailed description of substitutions, R-groups and preferred embodiments
  MOD_RES (13)..(13): Any L- or D-natural amino acid and any non-natural amino acid; see specification as filed for detailed description of substitutions, R-groups and preferred embodiments
  MOD_RES (15)..(18): Any L- or D-natural or non-natural amino acid, and this range may encompass 1 or 4 residues; see specification as filed for detailed description of substitutions, R-groups and preferred embodiments
  c-term may be amidated
XSMQVPFSRXXFXFXXXXTVGWVQRHRKMLR

SEQ ID NO: 1014 - protein, 31 aa, Artificial Sequence
  Description of Artificial Sequence: Synthetic peptide
  MOD_RES (2)..(2): Any L- or D-natural amino acid and any non-natural amino acid; see specification as filed for detailed description of substitutions, R-groups and preferred embodiments
  MOD_RES (10)..(11): Any L- or D-natural amino acid and any non-natural amino acid; see specification as filed for detailed description of substitutions, R-groups and preferred embodiments
  MOD_RES (13)..(13): Any L- or D-natural amino acid and any non-natural amino acid; see specification as filed for detailed description of substitutions, R-groups and preferred embodiments
  MOD_RES (15)..(18): Any L- or D-natural or non-natural amino acid, and this range may encompass 1 or 4 residues; see specification as filed for detailed description of substitutions, R-groups and preferred embodiments
  c-term may be amidated
KXMQVPFSRXXFXFXXXXTVGWVQRHRKMLR

SEQ ID NO: 1015 - protein, 31 aa, Artificial Sequence
  Description of Artificial Sequence: Synthetic peptide
  MOD_RES (3)..(3): Any L- or D-natural amino acid and any non-natural amino acid; see specification as filed for detailed description of substitutions, R-groups and preferred embodiments
  MOD_RES (10)..(11): Any L- or D-natural amino acid and any non-natural amino acid; see specification as filed for detailed description of substitutions, R-groups and preferred embodiments
  MOD_RES (13)..(13): Any L- or D-natural amino acid and any non-natural amino acid; see specification as filed for detailed description of substitutions, R-groups and preferred embodiments
  MOD_RES (15)..(18): Any L- or D-natural or non-natural amino acid, and this range may encompass 1 or 4 residues; see specification as filed for detailed description of substitutions, R-groups and preferred embodiments
  c-term may be amidated
KSXQVPFSRXXFXFXXXXTVGWVQRHRKMLR

SEQ ID NO: 1016 - protein, 31 aa, Artificial Sequence
  Description of Artificial Sequence: Synthetic peptide
  MOD_RES (4)..(4): Any L- or D-natural amino acid and any non-natural amino acid; see specification as filed for detailed description of substitutions, R-groups and preferred embodiments
  MOD_RES (10)..(11): Any L- or D-natural amino acid and any non-natural amino acid; see specification as filed for detailed description of substitutions, R-groups and preferred embodiments
  MOD_RES (13)..(13): Any L- or D-natural amino acid and any non-natural amino acid; see specification as filed for detailed description of substitutions, R-groups and preferred embodiments
  MOD_RES (15)..(18): Any L- or D-natural or non-natural amino acid, and this range may encompass 1 or 4 residues; see specification as filed for detailed description of substitutions, R-groups and preferred embodiments
  c-term may be amidated
KSMXVPFSRXXFXFXXXXTVGWVQRHRKMLR

SEQ ID NO: 1017 - protein, 31 aa, Artificial Sequence
  Description of Artificial Sequence: Synthetic peptide
  MOD_RES (5)..(5): Any L- or D-natural amino acid and any non-natural amino acid; see specification as filed for detailed description of substitutions, R-groups and preferred embodiments
  MOD_RES (10)..(11): Any L- or D-natural amino acid and any non-natural amino acid; see specification as filed for detailed description of substitutions, R-groups and preferred embodiments
  MOD_RES (13)..(13): Any L- or D-natural amino acid and any non-natural amino acid; see specification as filed for detailed description of substitutions, R-groups and preferred embodiments
  MOD_RES (15)..(18): Any L- or D-natural or non-natural amino acid, and this range may encompass 1 or 4 residues; see specification as filed for detailed description of substitutions, R-groups and preferred embodiments
  c-term may be amidated
KSMQXPFSRXXFXFXXXXTVGWVQRHRKMLR

SEQ ID NO: 1018 - protein, 31 aa, Artificial Sequence
  Description of Artificial Sequence: Synthetic peptide
  MOD_RES (6)..(6): Any L- or D-natural amino acid and any non-natural amino acid; see specification as filed for detailed description of substitutions, R-groups and preferred embodiments
  MOD_RES (10)..(11): Any L- or D-natural amino acid and any non-natural amino acid; see specification as filed for detailed description of substitutions, R-groups and preferred embodiments
  MOD_RES (13)..(13): Any L- or D-natural amino acid and any non-natural amino acid; see specification as filed for detailed description of substitutions, R-groups and preferred embodiments
  MOD_RES (15)..(18): Any L- or D-natural or non-natural amino acid, and this range may encompass 1 or 4 residues; see specification as filed for detailed description of substitutions, R-groups and preferred embodiments
  c-term may be amidated
KSMQVXFSRXXFXFXXXXTVGWVQRHRKMLR

SEQ ID NO: 1019 - protein, 31 aa, Artificial Sequence
  Description of Artificial Sequence: Synthetic peptide
  MOD_RES (7)..(7): Any L- or D-natural amino acid and any non-natural amino acid; see specification as filed for detailed description of substitutions, R-groups and preferred embodiments
  MOD_RES (10)..(11): Any L- or D-natural amino acid and any non-natural amino acid; see specification as filed for detailed description of substitutions, R-groups and preferred embodiments
  MOD_RES (13)..(13): Any L- or D-natural amino acid and any non-natural amino acid; see specification as filed for detailed description of substitutions, R-groups and preferred embodiments
  MOD_RES (15)..(18): Any L- or D-natural or non-natural amino acid, and this range may encompass 1 or 4 residues; see specification as filed for detailed description of substitutions, R-groups and preferred embodiments
  c-term may be amidated
KSMQVPXSRXXFXFXXXXTVGWVQRHRKMLR

SEQ ID NO: 1020 - protein, 31 aa, Artificial Sequence
  Description of Artificial Sequence: Synthetic peptide
  MOD_RES (8)..(8): Any L- or D-natural amino acid and any non-natural amino acid; see specification as filed for detailed description of substitutions, R-groups and preferred embodiments
  MOD_RES (10)..(11): Any L- or D-natural amino acid and any non-natural amino acid; see specification as filed for detailed description of substitutions, R-groups and preferred embodiments
  MOD_RES (13)..(13): Any L- or D-natural amino acid and any non-natural amino acid; see specification as filed for detailed description of substitutions, R-groups and preferred embodiments
  MOD_RES (15)..(18): Any L- or D-natural or non-natural amino acid, and this range may encompass 1 or 4 residues; see specification as filed for detailed description of substitutions, R-groups and preferred embodiments
  c-term may be amidated
KSMQVPFXRXXFXFXXXXTVGWVQRHRKMLR

SEQ ID NO: 1021 - protein, 31 aa, Artificial Sequence
  Description of Artificial Sequence: Synthetic peptide
  MOD_RES (9)..(11): Any L- or D-natural amino acid and any non-natural amino acid; see specification as filed for detailed description of substitutions, R-groups and preferred embodiments
  MOD_RES (13)..(13): Any L- or D-natural amino acid and any non-natural amino acid; see specification as filed for detailed description of substitutions, R-groups and preferred embodiments
  MOD_RES (15)..(18): Any L- or D-natural or non-natural amino acid, and this range may encompass 1 or 4 residues; see specification as filed for detailed description of substitutions, R-groups and preferred embodiments
  c-term may be amidated
KSMQVPFSXXXFXFXXXXTVGWVQRHRKMLR

SEQ ID NO: 1022 - protein, 31 aa, Artificial Sequence
  Description of Artificial Sequence: Synthetic peptide
  MOD_RES (14)..(14): Any L- or D-natural amino acid and any non-natural amino acid; see specification as filed for detailed description of substitutions, R-groups and preferred embodiments
  MOD_RES (15)..(18): Any L- or D-natural or non-natural amino acid, and this range may encompass 1 or 4 residues; see specification as filed for detailed description of substitutions, R-groups and preferred embodiments
  c-term may be amidated
KSMQVPFSRCCFSXXXXXTVGWVQRHRKMLR

SEQ ID NO: 1023 - protein, 31 aa, Artificial Sequence
  Description of Artificial Sequence: Synthetic peptide
  MOD_RES (10)..(11): Any L- or D-natural amino acid and any non-natural amino acid; see specification as filed for detailed description of substitutions, R-groups and preferred embodiments
  MOD_RES (14)..(14): Any L- or D-natural amino acid and any non-natural amino acid; see specification as filed for detailed description of substitutions, R-groups and preferred embodiments
  MOD_RES (15)..(18): Any L- or D-natural or non-natural amino acid, and this range may encompass 1 or 4 residues; see specification as filed for detailed description of substitutions, R-groups and preferred embodiments
  c-term may be amidated
KSMQVPFSRXXFSXXXXXTVGWVQRHRKMLR

SEQ ID NO: 1024 - protein, 31 aa, Artificial Sequence
  Description of Artificial Sequence: Synthetic peptide
  MOD_RES (1)..(1): Any L- or D-natural amino acid and any non-natural amino acid; see specification as filed for detailed description of substitutions, R-groups and preferred embodiments
  MOD_RES (10)..(11): Any L- or D-natural amino acid and any non-natural amino acid; see specification as filed for detailed description of substitutions, R-groups and preferred embodiments
  MOD_RES (14)..(14): Any L- or D-natural amino acid and any non-natural amino acid; see specification as filed for detailed description of substitutions, R-groups and preferred embodiments
  MOD_RES (15)..(18): Any L- or D-natural or non-natural amino acid, and this range may encompass 1 or 4 residues; see specification as filed for detailed description of substitutions, R-groups and preferred embodiments
  c-term may be amidated
XSMQVPFSRXXFSXXXXXTVGWVQRHRKMLR

SEQ ID NO: 1025 - protein, 31 aa, Artificial Sequence
  Description of Artificial Sequence: Synthetic peptide
  MOD_RES (2)..(2): Any L- or D-natural amino acid and any non-natural amino acid; see specification as filed for detailed description of substitutions, R-groups and preferred embodiments
  MOD_RES (10)..(11): Any L- or D-natural amino acid and any non-natural amino acid; see specification as filed for detailed description of substitutions, R-groups and preferred embodiments
  MOD_RES (14)..(14): Any L- or D-natural amino acid and any non-natural amino acid; see specification as filed for detailed description of substitutions, R-groups and preferred embodiments
  MOD_RES (15)..(18): Any L- or D-natural or non-natural amino acid, and this range may encompass 1 or 4 residues; see specification as filed for detailed description of substitutions, R-groups and preferred embodiments
  c-term may be amidated
KXMQVPFSRXXFSXXXXXTVGWVQRHRKMLR

SEQ ID NO: 1026 - protein, 31 aa, Artificial Sequence
  Description of Artificial Sequence: Synthetic peptide
  MOD_RES (3)..(3): Any L- or D-natural amino acid and any non-natural amino acid; see specification as filed for detailed description of substitutions, R-groups and preferred embodiments
  MOD_RES (10)..(11): Any L- or D-natural amino acid and any non-natural amino acid; see specification as filed for detailed description of substitutions, R-groups and preferred embodiments
  MOD_RES (14)..(14): Any L- or D-natural amino acid and any non-natural amino acid; see specification as filed for detailed description of substitutions, R-groups and preferred embodiments
  MOD_RES (15)..(18): Any L- or D-natural or non-natural amino acid, and this range may encompass 1 or 4 residues; see specification as filed for detailed description of substitutions, R-groups and preferred embodiments
  c-term may be amidated
KSXQVPFSRXXFSXXXXXTVGWVQRHRKMLR

SEQ ID NO: 1027 - protein, 31 aa, Artificial Sequence
  Description of Artificial Sequence: Synthetic peptide
  MOD_RES (4)..(4): Any L- or D-natural amino acid and any non-natural amino acid; see specification as filed for detailed description of substitutions, R-groups and preferred embodiments
  MOD_RES (10)..(11): Any L- or D-natural amino acid and any non-natural amino acid; see specification as filed for detailed description of substitutions, R-groups and preferred embodiments
  MOD_RES (14)..(14): Any L- or D-natural amino acid and any non-natural amino acid; see specification as filed for detailed description of substitutions, R-groups and preferred embodiments
  MOD_RES (15)..(18): Any L- or D-natural or non-natural amino acid, and this range may encompass 1 or 4 residues; see specification as filed for detailed description of substitutions, R-groups and preferred embodiments
  c-term may be amidated
KSMXVPFSRXXFSXXXXXTVGWVQRHRKMLR

SEQ ID NO: 1028 - protein, 31 aa, Artificial Sequence
  Description of Artificial Sequence: Synthetic peptide
  MOD_RES (5)..(5): Any L- or D-natural amino acid and any non-natural amino acid; see specification as filed for detailed description of substitutions, R-groups and preferred embodiments
  MOD_RES (10)..(11): Any L- or D-natural amino acid and any non-natural amino acid; see specification as filed for detailed description of substitutions, R-groups and preferred embodiments
  MOD_RES (14)..(14): Any L- or D-natural amino acid and any non-natural amino acid; see specification as filed for detailed description of substitutions, R-groups and preferred embodiments
  MOD_RES (15)..(18): Any L- or D-natural or non-natural amino acid, and this range may encompass 1 or 4 residues; see specification as filed for detailed description of substitutions, R-groups and preferred embodiments
  c-term may be amidated
KSMQXPFSRXXFSXXXXXTVGWVQRHRKMLR

SEQ ID NO: 1029 - protein, 31 aa, Artificial Sequence
  Description of Artificial Sequence: Synthetic peptide
  MOD_RES (6)..(6): Any L- or D-natural amino acid and any non-natural amino acid; see specification as filed for detailed description of substitutions, R-groups and preferred embodiments
  MOD_RES (10)..(11): Any L- or D-natural amino acid and any non-natural amino acid; see specification as filed for detailed description of substitutions, R-groups and preferred embodiments
  MOD_RES (14)..(14): Any L- or D-natural amino acid and any non-natural amino acid; see specification as filed for detailed description of substitutions, R-groups and preferred embodiments
  MOD_RES (15)..(18): Any L- or D-natural or non-natural amino acid, and this range may encompass 1 or 4 residues; see specification as filed for detailed description of substitutions, R-groups and preferred embodiments
  c-term may be amidated
KSMQVXFSRXXFSXXXXXTVGWVQRHRKMLR

SEQ ID NO: 1030 - protein, 31 aa, Artificial Sequence
  Description of Artificial Sequence: Synthetic peptide
  MOD_RES (7)..(7): Any L- or D-natural amino acid and any non-natural amino acid; see specification as filed for detailed description of substitutions, R-groups and preferred embodiments
  MOD_RES (10)..(11): Any L- or D-natural amino acid and any non-natural amino acid; see specification as filed for detailed description of substitutions, R-groups and preferred embodiments
  MOD_RES (14)..(14): Any L- or D-natural amino acid and any non-natural amino acid; see specification as filed for detailed description of substitutions, R-groups and preferred embodiments
  MOD_RES (15)..(18): Any L- or D-natural or non-natural amino acid, and this range may encompass 1 or 4 residues; see specification as filed for detailed description of substitutions, R-groups and preferred embodiments
  c-term may be amidated
KSMQVPXSRXXFSXXXXXTVGWVQRHRKMLR

SEQ ID NO: 1031 - protein, 31 aa, Artificial Sequence
  Description of Artificial Sequence: Synthetic peptide
  MOD_RES (8)..(8): Any L- or D-natural amino acid and any non-natural amino acid; see specification as filed for detailed description of substitutions, R-groups and preferred embodiments
  MOD_RES (10)..(11): Any L- or D-natural amino acid and any non-natural amino acid; see specification as filed for detailed description of substitutions, R-groups and preferred embodiments
  MOD_RES (14)..(14): Any L- or D-natural amino acid and any non-natural amino acid; see specification as filed for detailed description of substitutions, R-groups and preferred embodiments
  MOD_RES (15)..(18): Any L- or D-natural or non-natural amino acid, and this range may encompass 1 or 4 residues; see specification as filed for detailed description of substitutions, R-groups and preferred embodiments
  c-term may be amidated
KSMQVPFXRXXFSXXXXXTVGWVQRHRKMLR

SEQ ID NO: 1032 - protein, 31 aa, Artificial Sequence
  Description of Artificial Sequence: Synthetic peptide
  MOD_RES (9)..(11): Any L- or D-natural amino acid and any non-natural amino acid; see specification as filed for detailed description of substitutions, R-groups and preferred embodiments
  MOD_RES (14)..(14): Any L- or D-natural amino acid and any non-natural amino acid; see specification as filed for detailed description of substitutions, R-groups and preferred embodiments
  MOD_RES (15)..(18): Any L- or D-natural or non-natural amino acid, and this range may encompass 1 or 4 residues; see specification as filed for detailed description of substitutions, R-groups and preferred embodiments
  c-term may be amidated
KSMQVPFSXXXFSXXXXXTVGWVQRHRKMLR

SEQ ID NO: 1033 - protein, 34 aa, Artificial Sequence
  Description of Artificial Sequence: Synthetic peptide
  MOD_RES (18)..(21): Any L- or D-natural or non-natural amino acid, and this range may encompass 1 or 4 residues; see specification as filed for detailed description of substitutions, R-groups and preferred embodiments
  c-term may be amidated
KSMQVPFSRCCFSFAEQXXXXTVGWVQRHRKMLR

SEQ ID NO: 1034 - protein, 34 aa, Artificial Sequence
  Description of Artificial Sequence: Synthetic peptide
  MOD_RES (10)..(11): Any L- or D-natural amino acid and any non-natural amino acid; see specification as filed for detailed description of substitutions, R-groups and preferred embodiments
  MOD_RES (18)..(21): Any L- or D-natural or non-natural amino acid, and this range may encompass 1 or 4 residues; see specification as filed for detailed description of substitutions, R-groups and preferred embodiments
  c-term may be amidated
KSMQVPFSRXXFSFAEQXXXXTVGWVQRHRKMLR

SEQ ID NO: 1035 - protein, 34 aa, Artificial Sequence
  Description of Artificial Sequence: Synthetic peptide
  MOD_RES (1)..(1): Any L- or D-natural amino acid and any non-natural amino acid; see specification as filed for detailed description of substitutions, R-groups and preferred embodiments
  MOD_RES (10)..(11): Any L- or D-natural amino acid and any non-natural amino acid; see specification as filed for detailed description of substitutions, R-groups and preferred embodiments
  MOD_RES (18)..(21): Any L- or D-natural or non-natural amino acid, and this range may encompass 1 or 4 residues; see specification as filed for detailed description of substitutions, R-groups and preferred embodiments
  c-term may be amidated
XSMQVPFSRXXFSFAEQXXXXTVGWVQRHRKMLR

SEQ ID NO: 1036 - protein, 34 aa, Artificial Sequence
  Description of Artificial Sequence: Synthetic peptide
  MOD_RES (2)..(2): Any L- or D-natural amino acid and any non-natural amino acid; see specification as filed for detailed description of substitutions, R-groups and preferred embodiments
  MOD_RES (10)..(11): Any L- or D-natural amino acid and any non-natural amino acid; see specification as filed for detailed description of substitutions, R-groups and preferred embodiments
  MOD_RES (18)..(21): Any L- or D-natural or non-natural amino acid, and this range may encompass 1 or 4 residues; see specification as filed for detailed description of substitutions, R-groups and preferred embodiments
  c-term may be amidated
KXMQVPFSRXXFSFAEQXXXXTVGWVQRHRKMLR

SEQ ID NO: 1037 - protein, 34 aa, Artificial Sequence
  Description of Artificial Sequence: Synthetic peptide
  MOD_RES (3)..(3): Any L- or D-natural amino acid and any non-natural amino acid; see specification as filed for detailed description of substitutions, R-groups and preferred embodiments
  MOD_RES (10)..(11): Any L- or D-natural amino acid and any non-natural amino acid; see specification as filed for detailed description of substitutions, R-groups and preferred embodiments
  MOD_RES (18)..(21): Any L- or D-natural or non-natural amino acid, and this range may encompass 1 or 4 residues; see specification as filed for detailed description of substitutions, R-groups and preferred embodiments
  c-term may be amidated
KSXQVPFSRXXFSFAEQXXXXTVGWVQRHRKMLR

SEQ ID NO: 1038 - protein, 34 aa, Artificial Sequence
  Description of Artificial Sequence: Synthetic peptide
  MOD_RES (4)..(4): Any L- or D-natural amino acid and any non-natural amino acid; see specification as filed for detailed description of substitutions, R-groups and preferred embodiments
  MOD_RES (10)..(11): Any L- or D-natural amino acid and any non-natural amino acid; see specification as filed for detailed description of substitutions, R-groups and preferred embodiments
  MOD_RES (18)..(21): Any L- or D-natural or non-natural amino acid, and this range may encompass 1 or 4 residues; see specification as filed for detailed description of substitutions, R-groups and preferred embodiments
  c-term may be amidated
KSMXVPFSRXXFSFAEQXXXXTVGWVQRHRKMLR

SEQ ID NO: 1039 - protein, 34 aa, Artificial Sequence
  Description of Artificial Sequence: Synthetic peptide
  MOD_RES (5)..(5): Any L- or D-natural amino acid and any non-natural amino acid; see specification as filed for detailed description of substitutions, R-groups and preferred embodiments
  MOD_RES (10)..(11): Any L- or D-natural amino acid and any non-natural amino acid; see specification as filed for detailed description of substitutions, R-groups and preferred embodiments
  MOD_RES (18)..(21): Any L- or D-natural or non-natural amino acid, and this range may encompass 1 or 4 residues; see specification as filed for detailed description of substitutions, R-groups and preferred embodiments
  c-term may be amidated
KSMQXPFSRXXFSFAEQXXXXTVGWVQRHRKMLR

SEQ ID NO: 1040 - protein, 34 aa, Artificial Sequence
  Description of Artificial Sequence: Synthetic peptide
  MOD_RES (6)..(6): Any L- or D-natural amino acid and any non-natural amino acid; see specification as filed for detailed description of substitutions, R-groups and preferred embodiments
  MOD_RES (10)..(11): Any L- or D-natural amino acid and any non-natural amino acid; see specification as filed for detailed description of substitutions, R-groups and preferred embodiments
  MOD_RES (18)..(21): Any L- or D-natural or non-natural amino acid, and this range may encompass 1 or 4 residues; see specification as filed for detailed description of substitutions, R-groups and preferred embodiments
  c-term may be amidated
KSMQVXFSRXXFSFAEQXXXXTVGWVQRHRKMLR

SEQ ID NO: 1041 - protein, 34 aa, Artificial Sequence
  Description of Artificial Sequence: Synthetic peptide
  MOD_RES (7)..(7): Any L- or D-natural amino acid and any non-natural amino acid; see specification as filed for detailed description of substitutions, R-groups and preferred embodiments
  MOD_RES (10)..(11): Any L- or D-natural amino acid and any non-natural amino acid; see specification as filed for detailed description of substitutions, R-groups and preferred embodiments
  MOD_RES (18)..(21): Any L- or D-natural or non-natural amino acid, and this range may encompass 1 or 4 residues; see specification as filed for detailed description of substitutions, R-groups and preferred embodiments
  c-term may be amidated
KSMQVPXSRXXFSFAEQXXXXTVGWVQRHRKMLR

SEQ ID NO: 1042 - protein, 34 aa, Artificial Sequence
  Description of Artificial Sequence: Synthetic peptide
  MOD_RES (8)..(8): Any L- or D-natural amino acid and any non-natural amino acid; see specification as filed for detailed description of substitutions, R-groups and preferred embodiments
  MOD_RES (10)..(11): Any L- or D-natural amino acid and any non-natural amino acid; see specification as filed for detailed description of substitutions, R-groups and preferred embodiments
  MOD_RES (18)..(21): Any L- or D-natural or non-natural amino acid, and this range may encompass 1 or 4 residues; see specification as filed for detailed description of substitutions, R-groups and preferred embodiments
  c-term may be amidated
KSMQVPFXRXXFSFAEQXXXXTVGWVQRHRKMLR

SEQ ID NO: 1043 - protein, 34 aa, Artificial Sequence
  Description of Artificial Sequence: Synthetic peptide
  MOD_RES (9)..(11): Any L- or D-natural amino acid and any non-natural amino acid; see specification as filed for detailed description of substitutions, R-groups and preferred embodiments
  MOD_RES (18)..(21): Any L- or D-natural or non-natural amino acid, and this range may encompass 1 or 4 residues; see specification as filed for detailed description of substitutions, R-groups and preferred embodiments
  c-term may be amidated
KSMQVPFSXXXFSFAEQXXXXTVGWVQRHRKMLR

SEQ ID NO: 1044 - protein, 34 aa, Artificial Sequence
  Description of Artificial Sequence: Synthetic peptide
  MOD_RES (12)..(12): Any L- or D-natural amino acid and any non-natural amino acid; see specification as filed for detailed description of substitutions, R-groups and preferred embodiments
  MOD_RES (18)..(21): Any L- or D-natural or non-natural amino acid, and this range may encompass 1 or 4 residues; see specification as filed for detailed description of substitutions, R-groups and preferred embodiments
  c-term may be amidated
KSMQVPFSRCCXSFAEQXXXXTVGWVQRHRKMLR

SEQ ID NO: 1045 - protein, 34 aa, Artificial Sequence
  Description of Artificial Sequence: Synthetic peptide
  MOD_RES (10)..(12): Any L- or D-natural amino acid and any non-natural amino acid; see specification as filed for detailed description of substitutions, R-groups and preferred embodiments
  MOD_RES (18)..(21): Any L- or D-natural or non-natural amino acid, and this range may encompass 1 or 4 residues; see specification as filed for detailed description of substitutions, R-groups and preferred embodiments
  c-term may be amidated
KSMQVPFSRXXXSFAEQXXXXTVGWVQRHRKMLR

SEQ ID NO: 1046 - protein, 34 aa, Artificial Sequence
  Description of Artificial Sequence: Synthetic peptide
  MOD_RES (1)..(1): Any L- or D-natural amino acid and any non-natural amino acid; see specification as filed for detailed description of substitutions, R-groups and preferred embodiments
  MOD_RES (10)..(12): Any L- or D-natural amino acid and any non-natural amino acid; see specification as filed for detailed description of substitutions, R-groups and preferred embodiments
  MOD_RES (18)..(21): Any L- or D-natural or non-natural amino acid, and this range may encompass 1 or 4 residues; see specification as filed for detailed description of substitutions, R-groups and preferred embodiments
  c-term may be amidated
XSMQVPFSRXXXSFAEQXXXXTVGWVQRHRKMLR

SEQ ID NO: 1047 - protein, 34 aa, Artificial Sequence
  Description of Artificial Sequence: Synthetic peptide
  MOD_RES (2)..(2): Any L- or D-natural amino acid and any non-natural amino acid; see specification as filed for detailed description of substitutions, R-groups and preferred embodiments
  MOD_RES (10)..(12): Any L- or D-natural amino acid and any non-natural amino acid; see specification as filed for detailed description of substitutions, R-groups and preferred embodiments
  MOD_RES (18)..(21): Any L- or D-natural or non-natural amino acid, and this range may encompass 1 or 4 residues; see specification as filed for detailed description of substitutions, R-groups and preferred embodiments
  c-term may be amidated
KXMQVPFSRXXXSFAEQXXXXTVGWVQRHRKMLR

SEQ ID NO: 1048 - protein, 34 aa, Artificial Sequence
  Description of Artificial Sequence: Synthetic peptide
  MOD_RES (3)..(3): Any L- or D-natural amino acid and any non-natural amino acid; see specification as filed for detailed description of substitutions, R-groups and preferred embodiments
  MOD_RES (10)..(12): Any L- or D-natural amino acid and any non-natural amino acid; see specification as filed for detailed description of substitutions, R-groups and preferred embodiments
  MOD_RES (18)..(21): Any L- or D-natural or non-natural amino acid, and this range may encompass 1 or 4 residues; see specification as filed for detailed description of substitutions, R-groups and preferred embodiments
  c-term may be amidated
KSXQVPFSRXXXSFAEQXXXXTVGWVQRHRKMLR

SEQ ID NO: 1049 - protein, 34 aa, Artificial Sequence
  Description of Artificial Sequence: Synthetic peptide
  MOD_RES (4)..(4): Any L- or D-natural amino acid and any non-natural amino acid; see specification as filed for detailed description of substitutions, R-groups and preferred embodiments
  MOD_RES (10)..(12): Any L- or D-natural amino acid and any non-natural amino acid; see specification as filed for detailed description of substitutions, R-groups and preferred embodiments
  MOD_RES (18)..(21): Any L- or D-natural or non-natural amino acid, and this range may encompass 1 or 4 residues; see specification as filed for detailed description of substitutions, R-groups and preferred embodiments
  c-term may be amidated
KSMXVPFSRXXXSFAEQXXXXTVGWVQRHRKMLR

SEQ ID NO: 1050 - protein, 34 aa, Artificial Sequence
  Description of Artificial Sequence: Synthetic peptide
  MOD_RES (5)..(5): Any L- or D-natural amino acid and any non-natural amino acid; see specification as filed for detailed description of substitutions, R-groups and preferred embodiments
  MOD_RES (10)..(12): Any L- or D-natural amino acid and any non-natural amino acid; see specification as filed for detailed description of substitutions, R-groups and preferred embodiments
  MOD_RES (18)..(21): Any L- or D-natural or non-natural amino acid, and this range may encompass 1 or 4 residues; see specification as filed for detailed description of substitutions, R-groups and preferred embodiments
  c-term may be amidated
KSMQXPFSRXXXSFAEQXXXXTVGWVQRHRKMLR

SEQ ID NO: 1051 - protein, 34 aa, Artificial Sequence
  Description of Artificial Sequence: Synthetic peptide
  MOD_RES (6)..(6): Any L- or D-natural amino acid and any non-natural amino acid; see specification as filed for detailed description of substitutions, R-groups and preferred embodiments
  MOD_RES (10)..(12): Any L- or D-natural amino acid and any non-natural amino acid; see specification as filed for detailed description of substitutions, R-groups and preferred embodiments
  MOD_RES (18)..(21): Any L- or D-natural or non-natural amino acid, and this range may encompass 1 or 4 residues; see specification as filed for detailed description of substitutions, R-groups and preferred embodiments
  c-term may be amidated
KSMQVXFSRXXXSFAEQXXXXTVGWVQRHRKMLR

SEQ ID NO: 1052 - protein, 34 aa, Artificial Sequence
  Description of Artificial Sequence: Synthetic peptide
  MOD_RES (7)..(7): Any L- or D-natural amino acid and any non-natural amino acid; see specification as filed for detailed description of substitutions, R-groups and preferred embodiments
  MOD_RES (10)..(12): Any L- or D-natural amino acid and any non-natural amino acid; see specification as filed for detailed description of substitutions, R-groups and preferred embodiments
  MOD_RES (18)..(21): Any L- or D-natural or non-natural amino acid, and this range may encompass 1 or 4 residues; see specification as filed for detailed description of substitutions, R-groups and preferred embodiments
  c-term may be amidated
KSMQVPXSRXXXSFAEQXXXXTVGWVQRHRKMLR

SEQ ID NO: 1053 - protein, 34 aa, Artificial Sequence
  Description of Artificial Sequence: Synthetic peptide
  MOD_RES (8)..(8): Any L- or D-natural amino acid and any non-natural amino acid; see specification as filed for detailed description of substitutions, R-groups and preferred embodiments
  MOD_RES (10)..(12): Any L- or D-natural amino acid and any non-natural amino acid; see specification as filed for detailed description of substitutions, R-groups and preferred embodiments
  MOD_RES (18)..(21): Any L- or D-natural or non-natural amino acid, and this range may encompass 1 or 4 residues; see specification as filed for detailed description of substitutions, R-groups and preferred embodiments
  c-term may be amidated
KSMQVPFXRXXXSFAEQXXXXTVGWVQRHRKMLR

SEQ ID NO: 1054 - protein, 34 aa, Artificial Sequence
  Description of Artificial Sequence: Synthetic peptide
  MOD_RES (9)..(12): Any L- or D-natural amino acid and any non-natural amino acid; see specification as filed for detailed description of substitutions, R-groups and preferred embodiments
  MOD_RES (18)..(21): Any L- or D-natural or non-natural amino acid, and this range may encompass 1 or 4 residues; see specification as filed for detailed description of substitutions, R-groups and preferred embodiments
  c-term may be amidated
KSMQVPFSXXXXSFAEQXXXXTVGWVQRHRKMLR

SEQ ID NO: 1055 - protein, 34 aa, Artificial Sequence
  Description of Artificial Sequence: Synthetic peptide
  MOD_RES (13)..(13): Any L- or D-natural amino acid and any non-natural amino acid; see specification as filed for detailed description of substitutions, R-groups and preferred embodiments
  MOD_RES (18)..(21): Any L- or D-natural or non-natural amino acid, and this range may encompass 1 or 4 residues; see specification as filed for detailed description of substitutions, R-groups and preferred embodiments
  c-term may be amidated
KSMQVPFSRCCFXFAEQXXXXTVGWVQRHRKMLR

SEQ ID NO: 1056 - protein, 34 aa, Artificial Sequence
  Description of Artificial Sequence: Synthetic peptide
  MOD_RES (10)..(11): Any L- or D-natural amino acid and any non-natural amino acid; see specification as filed for detailed description of substitutions, R-groups and preferred embodiments
  MOD_RES (13)..(13): Any L- or D-natural amino acid and any non-natural amino acid; see specification as filed for detailed description of substitutions, R-groups and preferred embodiments
  MOD_RES (18)..(21): Any L- or D-natural or non-natural amino acid, and this range may encompass 1 or 4 residues; see specification as filed for detailed description of substitutions, R-groups and preferred embodiments
  c-term may be amidated
KSMQVPFSRXXFXFAEQXXXXTVGWVQRHRKMLR

SEQ ID NO: 1057 - protein, 34 aa, Artificial Sequence
  Description of Artificial Sequence: Synthetic peptide
  MOD_RES (1)..(1): Any L- or D-natural amino acid and any non-natural amino acid; see specification as filed for detailed description of substitutions, R-groups and preferred embodiments
  MOD_RES (10)..(11): Any L- or D-natural amino acid and any non-natural amino acid; see specification as filed for detailed description of substitutions, R-groups and preferred embodiments
  MOD_RES (13)..(13): Any L- or D-natural amino acid and any non-natural amino acid; see specification as filed for detailed description of substitutions, R-groups and preferred embodiments
  MOD_RES (18)..(21): Any L- or D-natural or non-natural amino acid, and this range may encompass 1 or 4 residues; see specification as filed for detailed description of substitutions, R-groups and preferred embodiments
  c-term may be amidated
XSMQVPFSRXXFXFAEQXXXXTVGWVQRHRKMLR

SEQ ID NO: 1058 - protein, 34 aa, Artificial Sequence
  Description of Artificial Sequence: Synthetic peptide
  MOD_RES (2)..(2): Any L- or D-natural amino acid and any non-natural amino acid; see specification as filed for detailed description of substitutions, R-groups and preferred embodiments
  MOD_RES (10)..(11): Any L- or D-natural amino acid and any non-natural amino acid; see specification as filed for detailed description of substitutions, R-groups and preferred embodiments
  MOD_RES (13)..(13): Any L- or D-natural amino acid and any non-natural amino acid; see specification as filed for detailed description of substitutions, R-groups and preferred embodiments
  MOD_RES (18)..(21): Any L- or D-natural or non-natural amino acid, and this range may encompass 1 or 4 residues; see specification as filed for detailed description of substitutions, R-groups and preferred embodiments
  c-term may be amidated
KXMQVPFSRXXFXFAEQXXXXTVGWVQRHRKMLR

SEQ ID NO: 1059 - protein, 34 aa, Artificial Sequence
  Description of Artificial Sequence: Synthetic peptide
  MOD_RES (3)..(3): Any L- or D-natural amino acid and any non-natural amino acid; see specification as filed for detailed description of substitutions, R-groups and preferred embodiments
  MOD_RES (10)..(11): Any L- or D-natural amino acid and any non-natural amino acid; see specification as filed for detailed description of substitutions, R-groups and preferred embodiments
  MOD_RES (13)..(13): Any L- or D-natural amino acid and any non-natural amino acid; see specification as filed for detailed description of substitutions, R-groups and preferred embodiments
  MOD_RES (18)..(21): Any L- or D-natural or non-natural amino acid, and this range may encompass 1 or 4 residues; see specification as filed for detailed description of substitutions, R-groups and preferred embodiments
  c-term may be amidated
KSXQVPFSRXXFXFAEQXXXXTVGWVQRHRKMLR

SEQ ID NO: 1060 - protein, 34 aa, Artificial Sequence
  Description of Artificial Sequence: Synthetic peptide
  MOD_RES (4)..(4): Any L- or D-natural amino acid and any non-natural amino acid; see specification as filed for detailed description of substitutions, R-groups and preferred embodiments
  MOD_RES (10)..(11): Any L- or D-natural amino acid and any non-natural amino acid; see specification as filed for detailed description of substitutions, R-groups and preferred embodiments
  MOD_RES (13)..(13): Any L- or D-natural amino acid and any non-natural amino acid; see specification as filed for detailed description of substitutions, R-groups and preferred embodiments
  MOD_RES (18)..(21): Any L- or D-natural or non-natural amino acid, and this range may encompass 1 or 4 residues; see specification as filed for detailed description of substitutions, R-groups and preferred embodiments
  c-term may be amidated
KSMXVPFSRXXFXFAEQXXXXTVGWVQRHRKMLR

SEQ ID NO: 1061 - protein, 34 aa, Artificial Sequence
  Description of Artificial Sequence: Synthetic peptide
  MOD_RES (5)..(5): Any L- or D-natural amino acid and any non-natural amino acid; see specification as filed for detailed description of substitutions, R-groups and preferred embodiments
  MOD_RES (10)..(11): Any L- or D-natural amino acid and any non-natural amino acid; see specification as filed for detailed description of substitutions, R-groups and preferred embodiments
  MOD_RES (13)..(13): Any L- or D-natural amino acid and any non-natural amino acid; see specification as filed for detailed description of substitutions, R-groups and preferred embodiments
  MOD_RES (18)..(21): Any L- or D-natural or non-natural amino acid, and this range may encompass 1 or 4 residues; see specification as filed for detailed description of substitutions, R-groups and preferred embodiments
  c-term may be amidated
KSMQXPFSRXXFXFAEQXXXXTVGWVQRHRKMLR

SEQ ID NO: 1062 - protein, 34 aa, Artificial Sequence
  Description of Artificial Sequence: Synthetic peptide
  MOD_RES (6)..(6): Any L- or D-natural amino acid and any non-natural amino acid; see specification as filed for detailed description of substitutions, R-groups and preferred embodiments
  MOD_RES (10)..(11): Any L- or D-natural amino acid and any non-natural amino acid; see specification as filed for detailed description of substitutions, R-groups and preferred embodiments
  MOD_RES (13)..(13): Any L- or D-natural amino acid and any non-natural amino acid; see specification as filed for detailed description of substitutions, R-groups and preferred embodiments
  MOD_RES (18)..(21): Any L- or D-natural or non-natural amino acid, and this range may encompass 1 or 4 residues; see specification as filed for detailed description of substitutions, R-groups and preferred embodiments
  c-term may be amidated
KSMQVXFSRXXFXFAEQXXXXTVGWVQRHRKMLR

SEQ ID NO: 1063 - protein, 34 aa, Artificial Sequence
  Description of Artificial Sequence: Synthetic peptide
  MOD_RES (7)..(7): Any L- or D-natural amino acid and any non-natural amino acid; see specification as filed for detailed description of substitutions, R-groups and preferred embodiments
  MOD_RES (10)..(11): Any L- or D-natural amino acid and any non-natural amino acid; see specification as filed for detailed description of substitutions, R-groups and preferred embodiments
  MOD_RES (13)..(13): Any L- or D-natural amino acid and any non-natural amino acid; see specification as filed for detailed description of substitutions, R-groups and preferred embodiments
  MOD_RES (18)..(21): Any L- or D-natural or non-natural amino acid, and this range may encompass 1 or 4 residues; see specification as filed for detailed description of substitutions, R-groups and preferred embodiments
  c-term may be amidated
KSMQVPXSRXXFXFAEQXXXXTVGWVQRHRKMLR

SEQ ID NO: 1064 - protein, 34 aa, Artificial Sequence
  Description of Artificial Sequence: Synthetic peptide
  MOD_RES (8)..(8): Any L- or D-natural amino acid and any non-natural amino acid; see specification as filed for detailed description of substitutions, R-groups and preferred embodiments
  MOD_RES (10)..(11): Any L- or D-natural amino acid and any non-natural amino acid; see specification as filed for detailed description of substitutions, R-groups and preferred embodiments
  MOD_RES (13)..(13): Any L- or D-natural amino acid and any non-natural amino acid; see specification as filed for detailed description of substitutions, R-groups and preferred embodiments
  MOD_RES (18)..(21): Any L- or D-natural or non-natural amino acid, and this range may encompass 1 or 4 residues; see specification as filed for detailed description of substitutions, R-groups and preferred embodiments
  c-term may be amidated
KSMQVPFXRXXFXFAEQXXXXTVGWVQRHRKMLR

SEQ ID NO: 1065 - protein, 34 aa, Artificial Sequence
  Description of Artificial Sequence: Synthetic peptide
  MOD_RES (9)..(11): Any L- or D-natural amino acid and any non-natural amino acid; see specification as filed for detailed description of substitutions, R-groups and preferred embodiments
  MOD_RES (13)..(13): Any L- or D-natural amino acid and any non-natural amino acid; see specification as filed for detailed description of substitutions, R-groups and preferred embodiments
  MOD_RES (18)..(21): Any L- or D-natural or non-natural amino acid, and this range may encompass 1 or 4 residues; see specification as filed for detailed description of substitutions, R-groups and preferred embodiments
  c-term may be amidated
KSMQVPFSXXXFXFAEQXXXXTVGWVQRHRKMLR

SEQ ID NO: 1066 - protein, 34 aa, Artificial Sequence
  Description of Artificial Sequence: Synthetic peptide
  MOD_RES (14)..(14): Any L- or D-natural amino acid and any non-natural amino acid; see specification as filed for detailed description of substitutions, R-groups and preferred embodiments
  MOD_RES (18)..(21): Any L- or D-natural or non-natural amino acid, and this range may encompass 1 or 4 residues; see specification as filed for detailed description of substitutions, R-groups and preferred embodiments
  c-term may be amidated
KSMQVPFSRCCFSXAEQXXXXTVGWVQRHRKMLR

SEQ ID NO: 1067 - protein, 34 aa, Artificial Sequence
  Description of Artificial Sequence: Synthetic peptide
  MOD_RES (10)..(11): Any L- or D-natural amino acid and any non-natural amino acid; see specification as filed for detailed description of substitutions, R-groups and preferred embodiments
  MOD_RES (14)..(14): Any L- or D-natural amino acid and any non-natural amino acid; see specification as filed for detailed description of substitutions, R-groups and preferred embodiments
  MOD_RES (18)..(21): Any L- or D-natural or non-natural amino acid, and this range may encompass 1 or 4 residues; see specification as filed for detailed description of substitutions, R-groups and preferred embodiments
  c-term may be amidated
KSMQVPFSRXXFSXAEQXXXXTVGWVQRHRKMLR

SEQ ID NO: 1068 - protein, 34 aa, Artificial Sequence
  Description of Artificial Sequence: Synthetic peptide
  MOD_RES (1)..(1): Any L- or D-natural amino acid and any non-natural amino acid; see specification as filed for detailed description of substitutions, R-groups and preferred embodiments
  MOD_RES (10)..(11): Any L- or D-natural amino acid and any non-natural amino acid; see specification as filed for detailed description of substitutions, R-groups and preferred embodiments
  MOD_RES (14)..(14): Any L- or D-natural amino acid and any non-natural amino acid; see specification as filed for detailed description of substitutions, R-groups and preferred embodiments
  MOD_RES (18)..(21): Any L- or D-natural or non-natural amino acid, and this range may encompass 1 or 4 residues; see specification as filed for detailed description of substitutions, R-groups and preferred embodiments
  c-term may be amidated
XSMQVPFSRXXFSXAEQXXXXTVGWVQRHRKMLR

SEQ ID NO: 1069 - protein, 34 aa, Artificial Sequence
  Description of Artificial Sequence: Synthetic peptide
  MOD_RES (2)..(2): Any L- or D-natural amino acid and any non-natural amino acid; see specification as filed for detailed description of substitutions, R-groups and preferred embodiments
  MOD_RES (10)..(11): Any L- or D-natural amino acid and any non-natural amino acid; see specification as filed for detailed description of substitutions, R-groups and preferred embodiments
  MOD_RES (14)..(14): Any L- or D-natural amino acid and any non-natural amino acid; see specification as filed for detailed description of substitutions, R-groups and preferred embodiments
  MOD_RES (18)..(21): Any L- or D-natural or non-natural amino acid, and this range may encompass 1 or 4 residues; see specification as filed for detailed description of substitutions, R-groups and preferred embodiments
  c-term may be amidated
KXMQVPFSRXXFSXAEQXXXXTVGWVQRHRKMLR

SEQ ID NO: 1070 - protein, 34 aa, Artificial Sequence
  Description of Artificial Sequence: Synthetic peptide
  MOD_RES (3)..(3): Any L- or D-natural amino acid and any non-natural amino acid; see specification as filed for detailed description of substitutions, R-groups and preferred embodiments
  MOD_RES (10)..(11): Any L- or D-natural amino acid and any non-natural amino acid; see specification as filed for detailed description of substitutions, R-groups and preferred embodiments
  MOD_RES (14)..(14): Any L- or D-natural amino acid and any non-natural amino acid; see specification as filed for detailed description of substitutions, R-groups and preferred embodiments
  MOD_RES (18)..(21): Any L- or D-natural or non-natural amino acid, and this range may encompass 1 or 4 residues; see specification as filed for detailed description of substitutions, R-groups and preferred embodiments
  c-term may be amidated
KSXQVPFSRXXFSXAEQXXXXTVGWVQRHRKMLR

SEQ ID NO: 1071 - protein, 34 aa, Artificial Sequence
  Description of Artificial Sequence: Synthetic peptide
  MOD_RES (4)..(4): Any L- or D-natural amino acid and any non-natural amino acid; see specification as filed for detailed description of substitutions, R-groups and preferred embodiments
  MOD_RES (10)..(11): Any L- or D-natural amino acid and any non-natural amino acid; see specification as filed for detailed description of substitutions, R-groups and preferred embodiments
  MOD_RES (14)..(14): Any L- or D-natural amino acid and any non-natural amino acid; see specification as filed for detailed description of substitutions, R-groups and preferred embodiments
  MOD_RES (18)..(21): Any L- or D-natural or non-natural amino acid, and this range may encompass 1 or 4 residues; see specification as filed for detailed description of substitutions, R-groups and preferred embodiments
  c-term may be amidated
KSMXVPFSRXXFSXAEQXXXXTVGWVQRHRKMLR

SEQ ID NO: 1072 - protein, 34 aa, Artificial Sequence
  Description of Artificial Sequence: Synthetic peptide
  MOD_RES (5)..(5): Any L- or D-natural amino acid and any non-natural amino acid; see specification as filed for detailed description of substitutions, R-groups and preferred embodiments
  MOD_RES (10)..(11): Any L- or D-natural amino acid and any non-natural amino acid; see specification as filed for detailed description of substitutions, R-groups and preferred embodiments
  MOD_RES (14)..(14): Any L- or D-natural amino acid and any non-natural amino acid; see specification as filed for detailed description of substitutions, R-groups and preferred embodiments
  MOD_RES (18)..(21): Any L- or D-natural or non-natural amino acid, and this range may encompass 1 or 4 residues; see specification as filed for detailed description of substitutions, R-groups and preferred embodiments
  c-term may be amidated
KSMQXPFSRXXFSXAEQXXXXTVGWVQRHRKMLR

SEQ ID NO: 1073 - protein, 34 aa, Artificial Sequence
  Description of Artificial Sequence: Synthetic peptide
  MOD_RES (6)..(6): Any L- or D-natural amino acid and any non-natural amino acid; see specification as filed for detailed description of substitutions, R-groups and preferred embodiments
  MOD_RES (10)..(11): Any L- or D-natural amino acid and any non-natural amino acid; see specification as filed for detailed description of substitutions, R-groups and preferred embodiments
  MOD_RES (14)..(14): Any L- or D-natural amino acid and any non-natural amino acid; see specification as filed for detailed description of substitutions, R-groups and preferred embodiments
  MOD_RES (18)..(21): Any L- or D-natural or non-natural amino acid, and this range may encompass 1 or 4 residues; see specification as filed for detailed description of substitutions, R-groups and preferred embodiments
  c-term may be amidated
KSMQVXFSRXXFSXAEQXXXXTVGWVQRHRKMLR

SEQ ID NO: 1074 - protein, 34 aa, Artificial Sequence
  Description of Artificial Sequence: Synthetic peptide
  MOD_RES (7)..(7): Any L- or D-natural amino acid and any non-natural amino acid; see specification as filed for detailed description of substitutions, R-groups and preferred embodiments
  MOD_RES (10)..(11): Any L- or D-natural amino acid and any non-natural amino acid; see specification as filed for detailed description of substitutions, R-groups and preferred embodiments
  MOD_RES (14)..(14): Any L- or D-natural amino acid and any non-natural amino acid; see specification as filed for detailed description of substitutions, R-groups and preferred embodiments
  MOD_RES (18)..(21): Any L- or D-natural or non-natural amino acid, and this range may encompass 1 or 4 residues; see specification as filed for detailed description of substitutions, R-groups and preferred embodiments
  c-term may be amidated
KSMQVPXSRXXFSXAEQXXXXTVGWVQRHRKMLR

SEQ ID NO: 1075 - protein, 34 aa, Artificial Sequence
  Description of Artificial Sequence: Synthetic peptide
  MOD_RES (8)..(8): Any L- or D-natural amino acid and any non-natural amino acid; see specification as filed for detailed description of substitutions, R-groups and preferred embodiments
  MOD_RES (10)..(11): Any L- or D-natural amino acid and any non-natural amino acid; see specification as filed for detailed description of substitutions, R-groups and preferred embodiments
  MOD_RES (14)..(14): Any L- or D-natural amino acid and any non-natural amino acid; see specification as filed for detailed description of substitutions, R-groups and preferred embodiments
  MOD_RES (18)..(21): Any L- or D-natural or non-natural amino acid, and this range may encompass 1 or 4 residues; see specification as filed for detailed description of substitutions, R-groups and preferred embodiments
  c-term may be amidated
KSMQVPFXRXXFSXAEQXXXXTVGWVQRHRKMLR

SEQ ID NO: 1076 - protein, 34 aa, Artificial Sequence
  Description of Artificial Sequence: Synthetic peptide
  MOD_RES (9)..(11): Any L- or D-natural amino acid and any non-natural amino acid; see specification as filed for detailed description of substitutions, R-groups and preferred embodiments
  MOD_RES (14)..(14): Any L- or D-natural amino acid and any non-natural amino acid; see specification as filed for detailed description of substitutions, R-groups and preferred embodiments
  MOD_RES (18)..(21): Any L- or D-natural or non-natural amino acid, and this range may encompass 1 or 4 residues; see specification as filed for detailed description of substitutions, R-groups and preferred embodiments
  c-term may be amidated
KSMQVPFSXXXFSXAEQXXXXTVGWVQRHRKMLR

SEQ ID NO: 1077 - protein, 34 aa, Artificial Sequence
  Description of Artificial Sequence: Synthetic peptide
  MOD_RES (15)..(15): Any L- or D-natural amino acid and any non-natural amino acid; see specification as filed for detailed description of substitutions, R-groups and preferred embodiments
  MOD_RES (18)..(21): Any L- or D-natural or non-natural amino acid, and this range may encompass 1 or 4 residues; see specification as filed for detailed description of substitutions, R-groups and preferred embodiments
  c-term may be amidated
KSMQVPFSRCCFSFXEQXXXXTVGWVQRHRKMLR

SEQ ID NO: 1078 - protein, 34 aa, Artificial Sequence
  Description of Artificial Sequence: Synthetic peptide
  MOD_RES (10)..(11): Any L- or D-natural amino acid and any non-natural amino acid; see specification as filed for detailed description of substitutions, R-groups and preferred embodiments
  MOD_RES (15)..(15): Any L- or D-natural amino acid and any non-natural amino acid; see specification as filed for detailed description of substitutions, R-groups and preferred embodiments
  MOD_RES (18)..(21): Any L- or D-natural or non-natural amino acid, and this range may encompass 1 or 4 residues; see specification as filed for detailed description of substitutions, R-groups and preferred embodiments
  c-term may be amidated
KSMQVPFSRXXFSFXEQXXXXTVGWVQRHRKMLR

SEQ ID NO: 1079 - protein, 34 aa, Artificial Sequence
  Description of Artificial Sequence: Synthetic peptide
  MOD_RES (1)..(1): Any L- or D-natural amino acid and any non-natural amino acid; see specification as filed for detailed description of substitutions, R-groups and preferred embodiments
  MOD_RES (10)..(11): Any L- or D-natural amino acid and any non-natural amino acid; see specification as filed for detailed description of substitutions, R-groups and preferred embodiments
  MOD_RES (15)..(15): Any L- or D-natural amino acid and any non-natural amino acid; see specification as filed for detailed description of substitutions, R-groups and preferred embodiments
  MOD_RES (18)..(21): Any L- or D-natural or non-natural amino acid, and this range may encompass 1 or 4 residues; see specification as filed for detailed description of substitutions, R-groups and preferred embodiments
  c-term may be amidated
XSMQVPFSRXXFSFXEQXXXXTVGWVQRHRKMLR

SEQ ID NO: 1080 - protein, 34 aa, Artificial Sequence
  Description of Artificial Sequence: Synthetic peptide
  MOD_RES (2)..(2): Any L- or D-natural amino acid and any non-natural amino acid; see specification as filed for detailed description of substitutions, R-groups and preferred embodiments
  MOD_RES (10)..(11): Any L- or D-natural amino acid and any non-natural amino acid; see specification as filed for detailed description of substitutions, R-groups and preferred embodiments
  MOD_RES (15)..(15): Any L- or D-natural amino acid and any non-natural amino acid; see specification as filed for detailed description of substitutions, R-groups and preferred embodiments
  MOD_RES (18)..(21): Any L- or D-natural or non-natural amino acid, and this range may encompass 1 or 4 residues; see specification as filed for detailed description of substitutions, R-groups and preferred embodiments
  c-term may be amidated
KXMQVPFSRXXFSFXEQXXXXTVGWVQRHRKMLR

SEQ ID NO: 1081 - protein, 34 aa, Artificial Sequence
  Description of Artificial Sequence: Synthetic peptide
  MOD_RES (3)..(3): Any L- or D-natural amino acid and any non-natural amino acid; see specification as filed for detailed description of substitutions, R-groups and preferred embodiments
  MOD_RES (10)..(11): Any L- or D-natural amino acid and any non-natural amino acid; see specification as filed for detailed description of substitutions, R-groups and preferred embodiments
  MOD_RES (15)..(15): Any L- or D-natural amino acid and any non-natural amino acid; see specification as filed for detailed description of substitutions, R-groups and preferred embodiments
  MOD_RES (18)..(21): Any L- or D-natural or non-natural amino acid, and this range may encompass 1 or 4 residues; see specification as filed for detailed description of substitutions, R-groups and preferred embodiments
  c-term may be amidated
KSXQVPFSRXXFSFXEQXXXXTVGWVQRHRKMLR

SEQ ID NO: 1082 - protein, 34 aa, Artificial Sequence
  Description of Artificial Sequence: Synthetic peptide
  MOD_RES (4)..(4): Any L- or D-natural amino acid and any non-natural amino acid; see specification as filed for detailed description of substitutions, R-groups and preferred embodiments
  MOD_RES (10)..(11): Any L- or D-natural amino acid and any non-natural amino acid; see specification as filed for detailed description of substitutions, R-groups and preferred embodiments
  MOD_RES (15)..(15): Any L- or D-natural amino acid and any non-natural amino acid; see specification as filed for detailed description of substitutions, R-groups and preferred embodiments
  MOD_RES (18)..(21): Any L- or D-natural or non-natural amino acid, and this range may encompass 1 or 4 residues; see specification as filed for detailed description of substitutions, R-groups and preferred embodiments
  c-term may be amidated
KSMXVPFSRXXFSFXEQXXXXTVGWVQRHRKMLR

SEQ ID NO: 1083 - protein, 34 aa, Artificial Sequence
  Description of Artificial Sequence: Synthetic peptide
  MOD_RES (5)..(5): Any L- or D-natural amino acid and any non-natural amino acid; see specification as filed for detailed description of substitutions, R-groups and preferred embodiments
  MOD_RES (10)..(11): Any L- or D-natural amino acid and any non-natural amino acid; see specification as filed for detailed description of substitutions, R-groups and preferred embodiments
  MOD_RES (15)..(15): Any L- or D-natural amino acid and any non-natural amino acid; see specification as filed for detailed description of substitutions, R-groups and preferred embodiments
  MOD_RES (18)..(21): Any L- or D-natural or non-natural amino acid, and this range may encompass 1 or 4 residues; see specification as filed for detailed description of substitutions, R-groups and preferred embodiments
  c-term may be amidated
KSMQXPFSRXXFSFXEQXXXXTVGWVQRHRKMLR

SEQ ID NO: 1084 - protein, 34 aa, Artificial Sequence
  Description of Artificial Sequence: Synthetic peptide
  MOD_RES (6)..(6): Any L- or D-natural amino acid and any non-natural amino acid; see specification as filed for detailed description of substitutions, R-groups and preferred embodiments
  MOD_RES (10)..(11): Any L- or D-natural amino acid and any non-natural amino acid; see specification as filed for detailed description of substitutions, R-groups and preferred embodiments
  MOD_RES (15)..(15): Any L- or D-natural amino acid and any non-natural amino acid; see specification as filed for detailed description of substitutions, R-groups and preferred embodiments
  MOD_RES (18)..(21): Any L- or D-natural or non-natural amino acid, and this range may encompass 1 or 4 residues; see specification as filed for detailed description of substitutions, R-groups and preferred embodiments
  c-term may be amidated
KSMQVXFSRXXFSFXEQXXXXTVGWVQRHRKMLR

SEQ ID NO: 1085 - protein, 34 aa, Artificial Sequence
  Description of Artificial Sequence: Synthetic peptide
  MOD_RES (7)..(7): Any L- or D-natural amino acid and any non-natural amino acid; see specification as filed for detailed description of substitutions, R-groups and preferred embodiments
  MOD_RES (10)..(11): Any L- or D-natural amino acid and any non-natural amino acid; see specification as filed for detailed description of substitutions, R-groups and preferred embodiments
  MOD_RES (15)..(15): Any L- or D-natural amino acid and any non-natural amino acid; see specification as filed for detailed description of substitutions, R-groups and preferred embodiments
  MOD_RES (18)..(21): Any L- or D-natural or non-natural amino acid, and this range may encompass 1 or 4 residues; see specification as filed for detailed description of substitutions, R-groups and preferred embodiments
  c-term may be amidated
KSMQVPXSRXXFSFXEQXXXXTVGWVQRHRKMLR

SEQ ID NO: 1086 - protein, 34 aa, Artificial Sequence
  Description of Artificial Sequence: Synthetic peptide
  MOD_RES (8)..(8): Any L- or D-natural amino acid and any non-natural amino acid; see specification as filed for detailed description of substitutions, R-groups and preferred embodiments
  MOD_RES (10)..(11): Any L- or D-natural amino acid and any non-natural amino acid; see specification as filed for detailed description of substitutions, R-groups and preferred embodiments
  MOD_RES (15)..(15): Any L- or D-natural amino acid and any non-natural amino acid; see specification as filed for detailed description of substitutions, R-groups and preferred embodiments
  MOD_RES (18)..(21): Any L- or D-natural or non-natural amino acid, and this range may encompass 1 or 4 residues; see specification as filed for detailed description of substitutions, R-groups and preferred embodiments
  c-term may be amidated
KSMQVPFXRXXFSFXEQXXXXTVGWVQRHRKMLR

SEQ ID NO: 1087 - protein, 34 aa, Artificial Sequence
  Description of Artificial Sequence: Synthetic peptide
  MOD_RES (9)..(11): Any L- or D-natural amino acid and any non-natural amino acid; see specification as filed for detailed description of substitutions, R-groups and preferred embodiments
  MOD_RES (15)..(15): Any L- or D-natural amino acid and any non-natural amino acid; see specification as filed for detailed description of substitutions, R-groups and preferred embodiments
  MOD_RES (18)..(21): Any L- or D-natural or non-natural amino acid, and this range may encompass 1 or 4 residues; see specification as filed for detailed description of substitutions, R-groups and preferred embodiments
  c-term may be amidated
KSMQVPFSXXXFSFXEQXXXXTVGWVQRHRKMLR

SEQ ID NO: 1088 - protein, 34 aa, Artificial Sequence
  Description of Artificial Sequence: Synthetic peptide
  MOD_RES (16)..(16): Any L- or D-natural amino acid and any non-natural amino acid; see specification as filed for detailed description of substitutions, R-groups and preferred embodiments
  MOD_RES (18)..(21): Any L- or D-natural or non-natural amino acid, and this range may encompass 1 or 4 residues; see specification as filed for detailed description of substitutions, R-groups and preferred embodiments
  c-term may be amidated
KSMQVPFSRCCFSFAXQXXXXTVGWVQRHRKMLR

SEQ ID NO: 1089 - protein, 34 aa, Artificial Sequence
  Description of Artificial Sequence: Synthetic peptide
  MOD_RES (10)..(11): Any L- or D-natural amino acid and any non-natural amino acid; see specification as filed for detailed description of substitutions, R-groups and preferred embodiments
  MOD_RES (16)..(16): Any L- or D-natural amino acid and any non-natural amino acid; see specification as filed for detailed description of substitutions, R-groups and preferred embodiments
  MOD_RES (18)..(21): Any L- or D-natural or non-natural amino acid, and this range may encompass 1 or 4 residues; see specification as filed for detailed description of substitutions, R-groups and preferred embodiments
  c-term may be amidated
KSMQVPFSRXXFSFAXQXXXXTVGWVQRHRKMLR

SEQ ID NO: 1090 - protein, 34 aa, Artificial Sequence
  Description of Artificial Sequence: Synthetic peptide
  MOD_RES (1)..(1): Any L- or D-natural amino acid and any non-natural amino acid; see specification as filed for detailed description of substitutions, R-groups and preferred embodiments
  MOD_RES (10)..(11): Any L- or D-natural amino acid and any non-natural amino acid; see specification as filed for detailed description of substitutions, R-groups and preferred embodiments
  MOD_RES (16)..(16): Any L- or D-natural amino acid and any non-natural amino acid; see specification as filed for detailed description of substitutions, R-groups and preferred embodiments
  MOD_RES (18)..(21): Any L- or D-natural or non-natural amino acid, and this range may encompass 1 or 4 residues; see specification as filed for detailed description of substitutions, R-groups and preferred embodiments
  c-term may be amidated
XSMQVPFSRXXFSFAXQXXXXTVGWVQRHRKMLR

SEQ ID NO: 1091 - protein, 34 aa, Artificial Sequence
  Description of Artificial Sequence: Synthetic peptide
  MOD_RES (2)..(2): Any L- or D-natural amino acid and any non-natural amino acid; see specification as filed for detailed description of substitutions, R-groups and preferred embodiments
  MOD_RES (10)..(11): Any L- or D-natural amino acid and any non-natural amino acid; see specification as filed for detailed description of substitutions, R-groups and preferred embodiments
  MOD_RES (16)..(16): Any L- or D-natural amino acid and any non-natural amino acid; see specification as filed for detailed description of substitutions, R-groups and preferred embodiments
  MOD_RES (18)..(21): Any L- or D-natural or non-natural amino acid, and this range may encompass 1 or 4 residues; see specification as filed for detailed description of substitutions, R-groups and preferred embodiments
  c-term may be amidated
KXMQVPFSRXXFSFAXQXXXXTVGWVQRHRKMLR

SEQ ID NO: 1092 - protein, 34 aa, Artificial Sequence
  Description of Artificial Sequence: Synthetic peptide
  MOD_RES (3)..(3): Any L- or D-natural amino acid and any non-natural amino acid; see specification as filed for detailed description of substitutions, R-groups and preferred embodiments
  MOD_RES (10)..(11): Any L- or D-natural amino acid and any non-natural amino acid; see specification as filed for detailed description of substitutions, R-groups and preferred embodiments
  MOD_RES (16)..(16): Any L- or D-natural amino acid and any non-natural amino acid; see specification as filed for detailed description of substitutions, R-groups and preferred embodiments
  MOD_RES (18)..(21): Any L- or D-natural or non-natural amino acid, and this range may encompass 1 or 4 residues; see specification as filed for detailed description of substitutions, R-groups and preferred embodiments
  c-term may be amidated
KSXQVPFSRXXFSFAXQXXXXTVGWVQRHRKMLR

SEQ ID NO: 1093 - protein, 34 aa, Artificial Sequence
  Description of Artificial Sequence: Synthetic peptide
  MOD_RES (4)..(4): Any L- or D-natural amino acid and any non-natural amino acid; see specification as filed for detailed description of substitutions, R-groups and preferred embodiments
  MOD_RES (10)..(11): Any L- or D-natural amino acid and any non-natural amino acid; see specification as filed for detailed description of substitutions, R-groups and preferred embodiments
  MOD_RES (16)..(16): Any L- or D-natural amino acid and any non-natural amino acid; see specification as filed for detailed description of substitutions, R-groups and preferred embodiments
  MOD_RES (18)..(21): Any L- or D-natural or non-natural amino acid, and this range may encompass 1 or 4 residues; see specification as filed for detailed description of substitutions, R-groups and preferred embodiments
  c-term may be amidated
KSMXVPFSRXXFSFAXQXXXXTVGWVQRHRKMLR

SEQ ID NO: 1094 - protein, 34 aa, Artificial Sequence
  Description of Artificial Sequence: Synthetic peptide
  MOD_RES (17)..(17): Any L- or D-natural amino acid and any non-natural amino acid; see specification as filed for detailed description of substitutions, R-groups and preferred embodiments
  MOD_RES (18)..(21): Any L- or D-natural or non-natural amino acid, and this range may encompass 1 or 4 residues; see specification as filed for detailed description of substitutions, R-groups and preferred embodiments
  c-term may be amidated
KSMQVPFSRCCFSFAEXXXXXTVGWVQRHRKMLR

SEQ ID NO: 1095 - protein, 34 aa, Artificial Sequence
  Description of Artificial Sequence: Synthetic peptide
  MOD_RES (10)..(11): Any L- or D-natural amino acid and any non-natural amino acid; see specification as filed for detailed description of substitutions, R-groups and preferred embodiments
  MOD_RES (17)..(17): Any L- or D-natural amino acid and any non-natural amino acid; see specification as filed for detailed description of substitutions, R-groups and preferred embodiments
  MOD_RES (18)..(21): Any L- or D-natural or non-natural amino acid, and this range may encompass 1 or 4 residues; see specification as filed for detailed description of substitutions, R-groups and preferred embodiments
  c-term may be amidated
KSMQVPFSRXXFSFAEXXXXXTVGWVQRHRKMLR

SEQ ID NO: 1096 - protein, 34 aa, Artificial Sequence
  Description of Artificial Sequence: Synthetic peptide
  MOD_RES (1)..(1): Any L- or D-natural amino acid and any non-natural amino acid; see specification as filed for detailed description of substitutions, R-groups and preferred embodiments
  MOD_RES (10)..(11): Any L- or D-natural amino acid and any non-natural amino acid; see specification as filed for detailed description of substitutions, R-groups and preferred embodiments
  MOD_RES (17)..(17): Any L- or D-natural amino acid and any non-natural amino acid; see specification as filed for detailed description of substitutions, R-groups and preferred embodiments
  MOD_RES (18)..(21): Any L- or D-natural or non-natural amino acid, and this range may encompass 1 or 4 residues; see specification as filed for detailed description of substitutions, R-groups and preferred embodiments
  c-term may be amidated
XSMQVPFSRXXFSFAEXXXXXTVGWVQRHRKMLR

SEQ ID NO: 1097 - protein, 34 aa, Artificial Sequence
  Description of Artificial Sequence: Synthetic peptide
  MOD_RES (2)..(2): Any L- or D-natural amino acid and any non-natural amino acid; see specification as filed for detailed description of substitutions, R-groups and preferred embodiments
  MOD_RES (10)..(11): Any L- or D-natural amino acid and any non-natural amino acid; see specification as filed for detailed description of substitutions, R-groups and preferred embodiments
  MOD_RES (17)..(17): Any L- or D-natural amino acid and any non-natural amino acid; see specification as filed for detailed description of substitutions, R-groups and preferred embodiments
  MOD_RES (18)..(21): Any L- or D-natural or non-natural amino acid, and this range may encompass 1 or 4 residues; see specification as filed for detailed description of substitutions, R-groups and preferred embodiments
  c-term may be amidated
KXMQVPFSRXXFSFAEXXXXXTVGWVQRHRKMLR

SEQ ID NO: 1098 - protein, 34 aa, Artificial Sequence
  Description of Artificial Sequence: Synthetic peptide
  MOD_RES (3)..(3): Any L- or D-natural amino acid and any non-natural amino acid; see specification as filed for detailed description of substitutions, R-groups and preferred embodiments
  MOD_RES (10)..(11): Any L- or D-natural amino acid and any non-natural amino acid; see specification as filed for detailed description of substitutions, R-groups and preferred embodiments
  MOD_RES (17)..(17): Any L- or D-natural amino acid and any non-natural amino acid; see specification as filed for detailed description of substitutions, R-groups and preferred embodiments
  MOD_RES (18)..(21): Any L- or D-natural or non-natural amino acid, and this range may encompass 1 or 4 residues; see specification as filed for detailed description of substitutions, R-groups and preferred embodiments
  c-term may be amidated
KSXQVPFSRXXFSFAEXXXXXTVGWVQRHRKMLR

SEQ ID NO: 1099 - protein, 34 aa, Artificial Sequence
  Description of Artificial Sequence: Synthetic peptide
  MOD_RES (4)..(4): Any L- or D-natural amino acid and any non-natural amino acid; see specification as filed for detailed description of substitutions, R-groups and preferred embodiments
  MOD_RES (10)..(11): Any L- or D-natural amino acid and any non-natural amino acid; see specification as filed for detailed description of substitutions, R-groups and preferred embodiments
  MOD_RES (17)..(17): Any L- or D-natural amino acid and any non-natural amino acid; see specification as filed for detailed description of substitutions, R-groups and preferred embodiments
  MOD_RES (18)..(21): Any L- or D-natural or non-natural amino acid, and this range may encompass 1 or 4 residues; see specification as filed for detailed description of substitutions, R-groups and preferred embodiments
  c-term may be amidated
KSMXVPFSRXXFSFAEXXXXXTVGWVQRHRKMLR

SEQ ID NO: 1100 - protein, 34 aa, Artificial Sequence
  Description of Artificial Sequence: Synthetic peptide
  MOD_RES (5)..(5): Any L- or D-natural amino acid and any non-natural amino acid; see specification as filed for detailed description of substitutions, R-groups and preferred embodiments
  MOD_RES (10)..(11): Any L- or D-natural amino acid and any non-natural amino acid; see specification as filed for detailed description of substitutions, R-groups and preferred embodiments
  MOD_RES (17)..(17): Any L- or D-natural amino acid and any non-natural amino acid; see specification as filed for detailed description of substitutions, R-groups and preferred embodiments
  MOD_RES (18)..(21): Any L- or D-natural or non-natural amino acid, and this range may encompass 1 or 4 residues; see specification as filed for detailed description of substitutions, R-groups and preferred embodiments
  c-term may be amidated
KSMQXPFSRXXFSFAEXXXXXTVGWVQRHRKMLR

SEQ ID NO: 1101 - protein, 34 aa, Artificial Sequence
  Description of Artificial Sequence: Synthetic peptide
  MOD_RES (6)..(6): Any L- or D-natural amino acid and any non-natural amino acid; see specification as filed for detailed description of substitutions, R-groups and preferred embodiments
  MOD_RES (10)..(11): Any L- or D-natural amino acid and any non-natural amino acid; see specification as filed for detailed description of substitutions, R-groups and preferred embodiments
  MOD_RES (17)..(17): Any L- or D-natural amino acid and any non-natural amino acid; see specification as filed for detailed description of substitutions, R-groups and preferred embodiments
  MOD_RES (18)..(21): Any L- or D-natural or non-natural amino acid, and this range may encompass 1 or 4 residues; see specification as filed for detailed description of substitutions, R-groups and preferred embodiments
  c-term may be amidated
KSMQVXFSRXXFSFAEXXXXXTVGWVQRHRKMLR

SEQ ID NO: 1102 - protein, 34 aa, Artificial Sequence
  Description of Artificial Sequence: Synthetic peptide
  MOD_RES (7)..(7): Any L- or D-natural amino acid and any non-natural amino acid; see specification as filed for detailed description of substitutions, R-groups and preferred embodiments
  MOD_RES (10)..(11): Any L- or D-natural amino acid and any non-natural amino acid; see specification as filed for detailed description of substitutions, R-groups and preferred embodiments
  MOD_RES (17)..(17): Any L- or D-natural amino acid and any non-natural amino acid; see specification as filed for detailed description of substitutions, R-groups and preferred embodiments
  MOD_RES (18)..(21): Any L- or D-natural or non-natural amino acid, and this range may encompass 1 or 4 residues; see specification as filed for detailed description of substitutions, R-groups and preferred embodiments
  c-term may be amidated
KSMQVPXSRXXFSFAEXXXXXTVGWVQRHRKMLR

SEQ ID NO: 1103 - protein, 34 aa, Artificial Sequence
  Description of Artificial Sequence: Synthetic peptide
  MOD_RES (8)..(8): Any L- or D-natural amino acid and any non-natural amino acid; see specification as filed for detailed description of substitutions, R-groups and preferred embodiments
  MOD_RES (10)..(11): Any L- or D-natural amino acid and any non-natural amino acid; see specification as filed for detailed description of substitutions, R-groups and preferred embodiments
  MOD_RES (17)..(17): Any L- or D-natural amino acid and any non-natural amino acid; see specification as filed for detailed description of substitutions, R-groups and preferred embodiments
  MOD_RES (18)..(21): Any L- or D-natural or non-natural amino acid, and this range may encompass 1 or 4 residues; see specification as filed for detailed description of substitutions, R-groups and preferred embodiments
  c-term may be amidated
KSMQVPFXRXXFSFAEXXXXXTVGWVQRHRKMLR

SEQ ID NO: 1104 - protein, 34 aa, Artificial Sequence
  Description of Artificial Sequence: Synthetic peptide
  MOD_RES (9)..(11): Any L- or D-natural amino acid and any non-natural amino acid; see specification as filed for detailed description of substitutions, R-groups and preferred embodiments
  MOD_RES (17)..(17): Any L- or D-natural amino acid and any non-natural amino acid; see specification as filed for detailed description of substitutions, R-groups and preferred embodiments
  MOD_RES (18)..(21): Any L- or D-natural or non-natural amino acid, and this range may encompass 1 or 4 residues; see specification as filed for detailed description of substitutions, R-groups and preferred embodiments
  c-term may be amidated
KSMQVPFSXXXFSFAEXXXXXTVGWVQRHRKMLR

SEQ ID NO: 1105 - protein, 31 aa, Artificial Sequence
  Description of Artificial Sequence: Synthetic peptide
  MOD_RES (15)..(18): Any L- or D-natural or non-natural amino acid, and this range may encompass 1 or 4 residues; see specification as filed for detailed description of substitutions, R-groups and preferred embodiments
  c-term may be amidated
KSMQVPFSRCCFSFXXXXTVGWVERHRKMLR

SEQ ID NO: 1106 - protein, 31 aa, Artificial Sequence
  Description of Artificial Sequence: Synthetic peptide
  MOD_RES (10)..(11): Any L- or D-natural amino acid and any non-natural amino acid; see specification as filed for detailed description of substitutions, R-groups and preferred embodiments
  MOD_RES (15)..(18): Any L- or D-natural or non-natural amino acid, and this range may encompass 1 or 4 residues; see specification as filed for detailed description of substitutions, R-groups and preferred embodiments
  c-term may be amidated
KSMQVPFSRXXFSFXXXXTVGWVERHRKMLR

SEQ ID NO: 1107 - protein, 31 aa, Artificial Sequence
  Description of Artificial Sequence: Synthetic peptide
  MOD_RES (1)..(1): Any L- or D-natural amino acid and any non-natural amino acid; see specification as filed for detailed description of substitutions, R-groups and preferred embodiments
  MOD_RES (10)..(11): Any L- or D-natural amino acid and any non-natural amino acid; see specification as filed for detailed description of substitutions, R-groups and preferred embodiments
  MOD_RES (15)..(18): Any L- or D-natural or non-natural amino acid, and this range may encompass 1 or 4 residues; see specification as filed for detailed description of substitutions, R-groups and preferred embodiments
  c-term may be amidated
XSMQVPFSRXXFSFXXXXTVGWVERHRKMLR

SEQ ID NO: 1108 - protein, 31 aa, Artificial Sequence
  Description of Artificial Sequence: Synthetic peptide
  MOD_RES (2)..(2): Any L- or D-natural amino acid and any non-natural amino acid; see specification as filed for detailed description of substitutions, R-groups and preferred embodiments
  MOD_RES (10)..(11): Any L- or D-natural amino acid and any non-natural amino acid; see specification as filed for detailed description of substitutions, R-groups and preferred embodiments
  MOD_RES (15)..(18): Any L- or D-natural or non-natural amino acid, and this range may encompass 1 or 4 residues; see specification as filed for detailed description of substitutions, R-groups and preferred embodiments
  c-term may be amidated
KXMQVPFSRXXFSFXXXXTVGWVERHRKMLR

SEQ ID NO: 1109 - protein, 31 aa, Artificial Sequence
  Description of Artificial Sequence: Synthetic peptide
  MOD_RES (3)..(3): Any L- or D-natural amino acid and any non-natural amino acid; see specification as filed for detailed description of substitutions, R-groups and preferred embodiments
  MOD_RES (10)..(11): Any L- or D-natural amino acid and any non-natural amino acid; see specification as filed for detailed description of substitutions, R-groups and preferred embodiments
  MOD_RES (15)..(18): Any L- or D-natural or non-natural amino acid, and this range may encompass 1 or 4 residues; see specification as filed for detailed description of substitutions, R-groups and preferred embodiments
  c-term may be amidated
KSXQVPFSRXXFSFXXXXTVGWVERHRKMLR

SEQ ID NO: 1110 - protein, 31 aa, Artificial Sequence
  Description of Artificial Sequence: Synthetic peptide
  MOD_RES (4)..(4): Any L- or D-natural amino acid and any non-natural amino acid; see specification as filed for detailed description of substitutions, R-groups and preferred embodiments
  MOD_RES (10)..(11): Any L- or D-natural amino acid and any non-natural amino acid; see specification as filed for detailed description of substitutions, R-groups and preferred embodiments
  MOD_RES (15)..(18): Any L- or D-natural or non-natural amino acid, and this range may encompass 1 or 4 residues; see specification as filed for detailed description of substitutions, R-groups and preferred embodiments
  c-term may be amidated
KSMXVPFSRXXFSFXXXXTVGWVERHRKMLR

SEQ ID NO: 1111 - protein, 31 aa, Artificial Sequence
  Description of Artificial Sequence: Synthetic peptide
  MOD_RES (5)..(5): Any L- or D-natural amino acid and any non-natural amino acid; see specification as filed for detailed description of substitutions, R-groups and preferred embodiments
  MOD_RES (10)..(11): Any L- or D-natural amino acid and any non-natural amino acid; see specification as filed for detailed description of substitutions, R-groups and preferred embodiments
  MOD_RES (15)..(18): Any L- or D-natural or non-natural amino acid, and this range may encompass 1 or 4 residues; see specification as filed for detailed description of substitutions, R-groups and preferred embodiments
  c-term may be amidated
KSMQXPFSRXXFSFXXXXTVGWVERHRKMLR

SEQ ID NO: 1112 - protein, 31 aa, Artificial Sequence
  Description of Artificial Sequence: Synthetic peptide
  MOD_RES (6)..(6): Any L- or D-natural amino acid and any non-natural amino acid; see specification as filed for detailed description of substitutions, R-groups and preferred embodiments
  MOD_RES (10)..(11): Any L- or D-natural amino acid and any non-natural amino acid; see specification as filed for detailed description of substitutions, R-groups and preferred embodiments
  MOD_RES (15)..(18): Any L- or D-natural or non-natural amino acid, and this range may encompass 1 or 4 residues; see specification as filed for detailed description of substitutions, R-groups and preferred embodiments
  c-term may be amidated
KSMQVXFSRXXFSFXXXXTVGWVERHRKMLR

SEQ ID NO: 1113 - protein, 31 aa, Artificial Sequence
  Description of Artificial Sequence: Synthetic peptide
  MOD_RES (7)..(7): Any L- or D-natural amino acid and any non-natural amino acid; see specification as filed for detailed description of substitutions, R-groups and preferred embodiments
  MOD_RES (10)..(11): Any L- or D-natural amino acid and any non-natural amino acid; see specification as filed for detailed description of substitutions, R-groups and preferred embodiments
  MOD_RES (15)..(18): Any L- or D-natural or non-natural amino acid, and this range may encompass 1 or 4 residues; see specification as filed for detailed description of substitutions, R-groups and preferred embodiments
  c-term may be amidated
KSMQVPXSRXXFSFXXXXTVGWVERHRKMLR

SEQ ID NO: 1114 - protein, 31 aa, Artificial Sequence
  Description of Artificial Sequence: Synthetic peptide
  MOD_RES (8)..(8): Any L- or D-natural amino acid and any non-natural amino acid; see specification as filed for detailed description of substitutions, R-groups and preferred embodiments
  MOD_RES (10)..(11): Any L- or D-natural amino acid and any non-natural amino acid; see specification as filed for detailed description of substitutions, R-groups and preferred embodiments
  MOD_RES (15)..(18): Any L- or D-natural or non-natural amino acid, and this range may encompass 1 or 4 residues; see specification as filed for detailed description of substitutions, R-groups and preferred embodiments
  c-term may be amidated
KSMQVPFXRXXFSFXXXXTVGWVERHRKMLR

SEQ ID NO: 1115 - protein, 31 aa, Artificial Sequence
  Description of Artificial Sequence: Synthetic peptide
  MOD_RES (9)..(11): Any L- or D-natural amino acid and any non-natural amino acid; see specification as filed for detailed description of substitutions, R-groups and preferred embodiments
  MOD_RES (15)..(18): Any L- or D-natural or non-natural amino acid, and this range may encompass 1 or 4 residues; see specification as filed for detailed description of substitutions, R-groups and preferred embodiments
  c-term may be amidated
KSMQVPFSXXXFSFXXXXTVGWVERHRKMLR

SEQ ID NO: 1116 - protein, 31 aa, Artificial Sequence
  Description of Artificial Sequence: Synthetic peptide
  MOD_RES (12)..(12): Any L- or D-natural amino acid and any non-natural amino acid; see specification as filed for detailed description of substitutions, R-groups and preferred embodiments
  MOD_RES (15)..(18): Any L- or D-natural or non-natural amino acid, and this range may encompass 1 or 4 residues; see specification as filed for detailed description of substitutions, R-groups and preferred embodiments
  c-term may be amidated
KSMQVPFSRCCXSFXXXXTVGWVERHRKMLR

SEQ ID NO: 1117 - protein, 31 aa, Artificial Sequence
  Description of Artificial Sequence: Synthetic peptide
  MOD_RES (10)..(12): Any L- or D-natural amino acid and any non-natural amino acid; see specification as filed for detailed description of substitutions, R-groups and preferred embodiments
  MOD_RES (15)..(18): Any L- or D-natural or non-natural amino acid, and this range may encompass 1 or 4 residues; see specification as filed for detailed description of substitutions, R-groups and preferred embodiments
  c-term may be amidated
KSMQVPFSRXXXSFXXXXTVGWVERHRKMLR

SEQ ID NO: 1118 - protein, 31 aa, Artificial Sequence
  Description of Artificial Sequence: Synthetic peptide
  MOD_RES (1)..(1): Any L- or D-natural amino acid and any non-natural amino acid; see specification as filed for detailed description of substitutions, R-groups and preferred embodiments
  MOD_RES (10)..(12): Any L- or D-natural amino acid and any non-natural amino acid; see specification as filed for detailed description of substitutions, R-groups and preferred embodiments
  MOD_RES (15)..(18): Any L- or D-natural or non-natural amino acid, and this range may encompass 1 or 4 residues; see specification as filed for detailed description of substitutions, R-groups and preferred embodiments
  c-term may be amidated
XSMQVPFSRXXXSFXXXXTVGWVERHRKMLR

SEQ ID NO: 1119 - protein, 31 aa, Artificial Sequence
  Description of Artificial Sequence: Synthetic peptide
  MOD_RES (2)..(2): Any L- or D-natural amino acid and any non-natural amino acid; see specification as filed for detailed description of substitutions, R-groups and preferred embodiments
  MOD_RES (10)..(12): Any L- or D-natural amino acid and any non-natural amino acid; see specification as filed for detailed description of substitutions, R-groups and preferred embodiments
  MOD_RES (15)..(18): Any L- or D-natural or non-natural amino acid, and this range may encompass 1 or 4 residues; see specification as filed for detailed description of substitutions, R-groups and preferred embodiments
  c-term may be amidated
KXMQVPFSRXXXSFXXXXTVGWVERHRKMLR

SEQ ID NO: 1120 - protein, 31 aa, Artificial Sequence
  Description of Artificial Sequence: Synthetic peptide
  MOD_RES (3)..(3): Any L- or D-natural amino acid and any non-natural amino acid; see specification as filed for detailed description of substitutions, R-groups and preferred embodiments
  MOD_RES (10)..(12): Any L- or D-natural amino acid and any non-natural amino acid; see specification as filed for detailed description of substitutions, R-groups and preferred embodiments
  MOD_RES (15)..(18): Any L- or D-natural or non-natural amino acid, and this range may encompass 1 or 4 residues; see specification as filed for detailed description of substitutions, R-groups and preferred embodiments
  c-term may be amidated
KSXQVPFSRXXXSFXXXXTVGWVERHRKMLR

SEQ ID NO: 1121 - protein, 31 aa, Artificial Sequence
  Description of Artificial Sequence: Synthetic peptide
  MOD_RES (4)..(4): Any L- or D-natural amino acid and any non-natural amino acid; see specification as filed for detailed description of substitutions, R-groups and preferred embodiments
  MOD_RES (10)..(12): Any L- or D-natural amino acid and any non-natural amino acid; see specification as filed for detailed description of substitutions, R-groups and preferred embodiments
  MOD_RES (15)..(18): Any L- or D-natural or non-natural amino acid, and this range may encompass 1 or 4 residues; see specification as filed for detailed description of substitutions, R-groups and preferred embodiments
  c-term may be amidated
KSMXVPFSRXXXSFXXXXTVGWVERHRKMLR

SEQ ID NO: 1122 - protein, 31 aa, Artificial Sequence
  Description of Artificial Sequence: Synthetic peptide
  MOD_RES (5)..(5): Any L- or D-natural amino acid and any non-natural amino acid; see specification as filed for detailed description of substitutions, R-groups and preferred embodiments
  MOD_RES (10)..(12): Any L- or D-natural amino acid and any non-natural amino acid; see specification as filed for detailed description of substitutions, R-groups and preferred embodiments
  MOD_RES (15)..(18): Any L- or D-natural or non-natural amino acid, and this range may encompass 1 or 4 residues; see specification as filed for detailed description of substitutions, R-groups and preferred embodiments
  c-term may be amidated
KSMQXPFSRXXXSFXXXXTVGWVERHRKMLR

SEQ ID NO: 1123 - protein, 31 aa, Artificial Sequence
  Description of Artificial Sequence: Synthetic peptide
  MOD_RES (6)..(6): Any L- or D-natural amino acid and any non-natural amino acid; see specification as filed for detailed description of substitutions, R-groups and preferred embodiments
  MOD_RES (10)..(12): Any L- or D-natural amino acid and any non-natural amino acid; see specification as filed for detailed description of substitutions, R-groups and preferred embodiments
  MOD_RES (15)..(18): Any L- or D-natural or non-natural amino acid, and this range may encompass 1 or 4 residues; see specification as filed for detailed description of substitutions, R-groups and preferred embodiments
  c-term may be amidated
KSMQVXFSRXXXSFXXXXTVGWVERHRKMLR

SEQ ID NO: 1124 - protein, 31 aa, Artificial Sequence
  Description of Artificial Sequence: Synthetic peptide
  MOD_RES (7)..(7): Any L- or D-natural amino acid and any non-natural amino acid; see specification as filed for detailed description of substitutions, R-groups and preferred embodiments
  MOD_RES (10)..(12): Any L- or D-natural amino acid and any non-natural amino acid; see specification as filed for detailed description of substitutions, R-groups and preferred embodiments
  MOD_RES (15)..(18): Any L- or D-natural or non-natural amino acid, and this range may encompass 1 or 4 residues; see specification as filed for detailed description of substitutions, R-groups and preferred embodiments
  c-term may be amidated
KSMQVPXSRXXXSFXXXXTVGWVERHRKMLR

SEQ ID NO: 1125 - protein, 31 aa, Artificial Sequence
  Description of Artificial Sequence: Synthetic peptide
  MOD_RES (8)..(8): Any L- or D-natural amino acid and any non-natural amino acid; see specification as filed for detailed description of substitutions, R-groups and preferred embodiments
  MOD_RES (10)..(12): Any L- or D-natural amino acid and any non-natural amino acid; see specification as filed for detailed description of substitutions, R-groups and preferred embodiments
  MOD_RES (15)..(18): Any L- or D-natural or non-natural amino acid, and this range may encompass 1 or 4 residues; see specification as filed for detailed description of substitutions, R-groups and preferred embodiments
  c-term may be amidated
KSMQVPFXRXXXSFXXXXTVGWVERHRKMLR

SEQ ID NO: 1126 - protein, 31 aa, Artificial Sequence
  Description of Artificial Sequence: Synthetic peptide
  MOD_RES (9)..(12): Any L- or D-natural amino acid and any non-natural amino acid; see specification as filed for detailed description of substitutions, R-groups and preferred embodiments
  MOD_RES (15)..(18): Any L- or D-natural or non-natural amino acid, and this range may encompass 1 or 4 residues; see specification as filed for detailed description of substitutions, R-groups and preferred embodiments
  c-term may be amidated
KSMQVPFSXXXXSFXXXXTVGWVERHRKMLR

SEQ ID NO: 1127 - protein, 31 aa, Artificial Sequence
  Description of Artificial Sequence: Synthetic peptide
  MOD_RES (13)..(13): Any L- or D-natural amino acid and any non-natural amino acid; see specification as filed for detailed description of substitutions, R-groups and preferred embodiments
  MOD_RES (15)..(18): Any L- or D-natural or non-natural amino acid, and this range may encompass 1 or 4 residues; see specification as filed for detailed description of substitutions, R-groups and preferred embodiments
  c-term may be amidated
KSMQVPFSRCCFXFXXXXTVGWVERHRKMLR

SEQ ID NO: 1128 - protein, 31 aa, Artificial Sequence
  Description of Artificial Sequence: Synthetic peptide
  MOD_RES (10)..(11): Any L- or D-natural amino acid and any non-natural amino acid; see specification as filed for detailed description of substitutions, R-groups and preferred embodiments
  MOD_RES (13)..(13): Any L- or D-natural amino acid and any non-natural amino acid; see specification as filed for detailed description of substitutions, R-groups and preferred embodiments
  MOD_RES (15)..(18): Any L- or D-natural or non-natural amino acid, and this range may encompass 1 or 4 residues; see specification as filed for detailed description of substitutions, R-groups and preferred embodiments
  c-term may be amidated
KSMQVPFSRXXFXFXXXXTVGWVERHRKMLR

SEQ ID NO: 1129 - protein, 31 aa, Artificial Sequence
  Description of Artificial Sequence: Synthetic peptide
  MOD_RES (1)..(1): Any L- or D-natural amino acid and any non-natural amino acid; see specification as filed for detailed description of substitutions, R-groups and preferred embodiments
  MOD_RES (10)..(11): Any L- or D-natural amino acid and any non-natural amino acid; see specification as filed for detailed description of substitutions, R-groups and preferred embodiments
  MOD_RES (13)..(13): Any L- or D-natural amino acid and any non-natural amino acid; see specification as filed for detailed description of substitutions, R-groups and preferred embodiments
  MOD_RES (15)..(18): Any L- or D-natural or non-natural amino acid, and this range may encompass 1 or 4 residues; see specification as filed for detailed description of substitutions, R-groups and preferred embodiments
  c-term may be amidated
XSMQVPFSRXXFXFXXXXTVGWVERHRKMLR

SEQ ID NO: 1130 - protein, 31 aa, Artificial Sequence
  Description of Artificial Sequence: Synthetic peptide
  MOD_RES (2)..(2): Any L- or D-natural amino acid and any non-natural amino acid; see specification as filed for detailed description of substitutions, R-groups and preferred embodiments
  MOD_RES (10)..(11): Any L- or D-natural amino acid and any non-natural amino acid; see specification as filed for detailed description of substitutions, R-groups and preferred embodiments
  MOD_RES (13)..(13): Any L- or D-natural amino acid and any non-natural amino acid; see specification as filed for detailed description of substitutions, R-groups and preferred embodiments
  MOD_RES (15)..(18): Any L- or D-natural or non-natural amino acid, and this range may encompass 1 or 4 residues; see specification as filed for detailed description of substitutions, R-groups and preferred embodiments
  c-term may be amidated
KXMQVPFSRXXFXFXXXXTVGWVERHRKMLR

SEQ ID NO: 1131 - protein, 31 aa, Artificial Sequence
  Description of Artificial Sequence: Synthetic peptide
  MOD_RES (3)..(3): Any L- or D-natural amino acid and any non-natural amino acid; see specification as filed for detailed description of substitutions, R-groups and preferred embodiments
  MOD_RES (10)..(11): Any L- or D-natural amino acid and any non-natural amino acid; see specification as filed for detailed description of substitutions, R-groups and preferred embodiments
  MOD_RES (13)..(13): Any L- or D-natural amino acid and any non-natural amino acid; see specification as filed for detailed description of substitutions, R-groups and preferred embodiments
  MOD_RES (15)..(18): Any L- or D-natural or non-natural amino acid, and this range may encompass 1 or 4 residues; see specification as filed for detailed description of substitutions, R-groups and preferred embodiments
  c-term may be amidated
KSXQVPFSRXXFXFXXXXTVGWVERHRKMLR

SEQ ID NO: 1132 - protein, 31 aa, Artificial Sequence
  Description of Artificial Sequence: Synthetic peptide
  MOD_RES (4)..(4): Any L- or D-natural amino acid and any non-natural amino acid; see specification as filed for detailed description of substitutions, R-groups and preferred embodiments
  MOD_RES (10)..(11): Any L- or D-natural amino acid and any non-natural amino acid; see specification as filed for detailed description of substitutions, R-groups and preferred embodiments
  MOD_RES (13)..(13): Any L- or D-natural amino acid and any non-natural amino acid; see specification as filed for detailed description of substitutions, R-groups and preferred embodiments
  MOD_RES (15)..(18): Any L- or D-natural or non-natural amino acid, and this range may encompass 1 or 4 residues; see specification as filed for detailed description of substitutions, R-groups and preferred embodiments
  c-term may be amidated
KSMXVPFSRXXFXFXXXXTVGWVERHRKMLR

SEQ ID NO: 1133 - protein, 31 aa, Artificial Sequence
  Description of Artificial Sequence: Synthetic peptide
  MOD_RES (5)..(5): Any L- or D-natural amino acid and any non-natural amino acid; see specification as filed for detailed description of substitutions, R-groups and preferred embodiments
  MOD_RES (10)..(11): Any L- or D-natural amino acid and any non-natural amino acid; see specification as filed for detailed description of substitutions, R-groups and preferred embodiments
  MOD_RES (13)..(13): Any L- or D-natural amino acid and any non-natural amino acid; see specification as filed for detailed description of substitutions, R-groups and preferred embodiments
  MOD_RES (15)..(18): Any L- or D-natural or non-natural amino acid, and this range may encompass 1 or 4 residues; see specification as filed for detailed description of substitutions, R-groups and preferred embodiments
  c-term may be amidated
KSMQXPFSRXXFXFXXXXTVGWVERHRKMLR

SEQ ID NO: 1134 - protein, 31 aa, Artificial Sequence
  Description of Artificial Sequence: Synthetic peptide
  MOD_RES (6)..(6): Any L- or D-natural amino acid and any non-natural amino acid; see specification as filed for detailed description of substitutions, R-groups and preferred embodiments
  MOD_RES (10)..(11): Any L- or D-natural amino acid and any non-natural amino acid; see specification as filed for detailed description of substitutions, R-groups and preferred embodiments
  MOD_RES (13)..(13): Any L- or D-natural amino acid and any non-natural amino acid; see specification as filed for detailed description of substitutions, R-groups and preferred embodiments
  MOD_RES (15)..(18): Any L- or D-natural or non-natural amino acid, and this range may encompass 1 or 4 residues; see specification as filed for detailed description of substitutions, R-groups and preferred embodiments
  c-term may be amidated
KSMQVXFSRXXFXFXXXXTVGWVERHRKMLR

SEQ ID NO: 1135 - protein, 31 aa, Artificial Sequence
  Description of Artificial Sequence: Synthetic peptide
  MOD_RES (7)..(7): Any L- or D-natural amino acid and any non-natural amino acid; see specification as filed for detailed description of substitutions, R-groups and preferred embodiments
  MOD_RES (10)..(11): Any L- or D-natural amino acid and any non-natural amino acid; see specification as filed for detailed description of substitutions, R-groups and preferred embodiments
  MOD_RES (13)..(13): Any L- or D-natural amino acid and any non-natural amino acid; see specification as filed for detailed description of substitutions, R-groups and preferred embodiments
  MOD_RES (15)..(18): Any L- or D-natural or non-natural amino acid, and this range may encompass 1 or 4 residues; see specification as filed for detailed description of substitutions, R-groups and preferred embodiments
  c-term may be amidated
KSMQVPXSRXXFXFXXXXTVGWVERHRKMLR

SEQ ID NO: 1136 - protein, 31 aa, Artificial Sequence
  Description of Artificial Sequence: Synthetic peptide
  MOD_RES (8)..(8): Any L- or D-natural amino acid and any non-natural amino acid; see specification as filed for detailed description of substitutions, R-groups and preferred embodiments
  MOD_RES (10)..(11): Any L- or D-natural amino acid and any non-natural amino acid; see specification as filed for detailed description of substitutions, R-groups and preferred embodiments
  MOD_RES (13)..(13): Any L- or D-natural amino acid and any non-natural amino acid; see specification as filed for detailed description of substitutions, R-groups and preferred embodiments
  MOD_RES (15)..(18): Any L- or D-natural or non-natural amino acid, and this range may encompass 1 or 4 residues; see specification as filed for detailed description of substitutions, R-groups and preferred embodiments
  c-term may be amidated
KSMQVPFXRXXFXFXXXXTVGWVERHRKMLR

SEQ ID NO: 1137 - protein, 31 aa, Artificial Sequence
  Description of Artificial Sequence: Synthetic peptide
  MOD_RES (9)..(11): Any L- or D-natural amino acid and any non-natural amino acid; see specification as filed for detailed description of substitutions, R-groups and preferred embodiments
  MOD_RES (13)..(13): Any L- or D-natural amino acid and any non-natural amino acid; see specification as filed for detailed description of substitutions, R-groups and preferred embodiments
  MOD_RES (15)..(18): Any L- or D-natural or non-natural amino acid, and this range may encompass 1 or 4 residues; see specification as filed for detailed description of substitutions, R-groups and preferred embodiments
  c-term may be amidated
KSMQVPFSXXXFXFXXXXTVGWVERHRKMLR

SEQ ID NO: 1138 - protein, 31 aa, Artificial Sequence
  Description of Artificial Sequence: Synthetic peptide
  MOD_RES (14)..(14): Any L- or D-natural amino acid and any non-natural amino acid; see specification as filed for detailed description of substitutions, R-groups and preferred embodiments
  MOD_RES (15)..(18): Any L- or D-natural or non-natural amino acid, and this range may encompass 1 or 4 residues; see specification as filed for detailed description of substitutions, R-groups and preferred embodiments
  c-term may be amidated
KSMQVPFSRCCFSXXXXXTVGWVERHRKMLR

SEQ ID NO: 1139 - protein, 31 aa, Artificial Sequence
  Description of Artificial Sequence: Synthetic peptide
  MOD_RES (10)..(11): Any L- or D-natural amino acid and any non-natural amino acid; see specification as filed for detailed description of substitutions, R-groups and preferred embodiments
  MOD_RES (14)..(14): Any L- or D-natural amino acid and any non-natural amino acid; see specification as filed for detailed description of substitutions, R-groups and preferred embodiments
  MOD_RES (15)..(18): Any L- or D-natural or non-natural amino acid, and this range may encompass 1 or 4 residues; see specification as filed for detailed description of substitutions, R-groups and preferred embodiments
  c-term may be amidated
KSMQVPFSRXXFSXXXXXTVGWVERHRKMLR

SEQ ID NO: 1140 - protein, 31 aa, Artificial Sequence
  Description of Artificial Sequence: Synthetic peptide
  MOD_RES (1)..(1): Any L- or D-natural amino acid and any non-natural amino acid; see specification as filed for detailed description of substitutions, R-groups and preferred embodiments
  MOD_RES (10)..(11): Any L- or D-natural amino acid and any non-natural amino acid; see specification as filed for detailed description of substitutions, R-groups and preferred embodiments
  MOD_RES (14)..(14): Any L- or D-natural amino acid and any non-natural amino acid; see specification as filed for detailed description of substitutions, R-groups and preferred embodiments
  MOD_RES (15)..(18): Any L- or D-natural or non-natural amino acid, and this range may encompass 1 or 4 residues; see specification as filed for detailed description of substitutions, R-groups and preferred embodiments
  c-term may be amidated
XSMQVPFSRXXFSXXXXXTVGWVERHRKMLR

SEQ ID NO: 1141 - protein, 31 aa, Artificial Sequence
  Description of Artificial Sequence: Synthetic peptide
  MOD_RES (2)..(2): Any L- or D-natural amino acid and any non-natural amino acid; see specification as filed for detailed description of substitutions, R-groups and preferred embodiments
  MOD_RES (10)..(11): Any L- or D-natural amino acid and any non-natural amino acid; see specification as filed for detailed description of substitutions, R-groups and preferred embodiments
  MOD_RES (14)..(14): Any L- or D-natural amino acid and any non-natural amino acid; see specification as filed for detailed description of substitutions, R-groups and preferred embodiments
  MOD_RES (15)..(18): Any L- or D-natural or non-natural amino acid, and this range may encompass 1 or 4 residues; see specification as filed for detailed description of substitutions, R-groups and preferred embodiments
  c-term may be amidated
KXMQVPFSRXXFSXXXXXTVGWVERHRKMLR

SEQ ID NO: 1142 - protein, 31 aa, Artificial Sequence
  Description of Artificial Sequence: Synthetic peptide
  MOD_RES (3)..(3): Any L- or D-natural amino acid and any non-natural amino acid; see specification as filed for detailed description of substitutions, R-groups and preferred embodiments
  MOD_RES (10)..(11): Any L- or D-natural amino acid and any non-natural amino acid; see specification as filed for detailed description of substitutions, R-groups and preferred embodiments
  MOD_RES (14)..(14): Any L- or D-natural amino acid and any non-natural amino acid; see specification as filed for detailed description of substitutions, R-groups and preferred embodiments
  MOD_RES (15)..(18): Any L- or D-natural or non-natural amino acid, and this range may encompass 1 or 4 residues; see specification as filed for detailed description of substitutions, R-groups and preferred embodiments
  c-term may be amidated
KSXQVPFSRXXFSXXXXXTVGWVERHRKMLR

SEQ ID NO: 1143 - protein, 31 aa, Artificial Sequence
  Description of Artificial Sequence: Synthetic peptide
  MOD_RES (4)..(4): Any L- or D-natural amino acid and any non-natural amino acid; see specification as filed for detailed description of substitutions, R-groups and preferred embodiments
  MOD_RES (10)..(11): Any L- or D-natural amino acid and any non-natural amino acid; see specification as filed for detailed description of substitutions, R-groups and preferred embodiments
  MOD_RES (14)..(14): Any L- or D-natural amino acid and any non-natural amino acid; see specification as filed for detailed description of substitutions, R-groups and preferred embodiments
  MOD_RES (15)..(18): Any L- or D-natural or non-natural amino acid, and this range may encompass 1 or 4 residues; see specification as filed for detailed description of substitutions, R-groups and preferred embodiments
  c-term may be amidated
KSMXVPFSRXXFSXXXXXTVGWVERHRKMLR

SEQ ID NO: 1144 - protein, 31 aa, Artificial Sequence
  Description of Artificial Sequence: Synthetic peptide
  MOD_RES (5)..(5): Any L- or D-natural amino acid and any non-natural amino acid; see specification as filed for detailed description of substitutions, R-groups and preferred embodiments
  MOD_RES (10)..(11): Any L- or D-natural amino acid and any non-natural amino acid; see specification as filed for detailed description of substitutions, R-groups and preferred embodiments
  MOD_RES (14)..(14): Any L- or D-natural amino acid and any non-natural amino acid; see specification as filed for detailed description of substitutions, R-groups and preferred embodiments
  MOD_RES (15)..(18): Any L- or D-natural or non-natural amino acid, and this range may encompass 1 or 4 residues; see specification as filed for detailed description of substitutions, R-groups and preferred embodiments
  c-term may be amidated
KSMQXPFSRXXFSXXXXXTVGWVERHRKMLR

SEQ ID NO: 1145 - protein, 31 aa, Artificial Sequence
  Description of Artificial Sequence: Synthetic peptide
  MOD_RES (6)..(6): Any L- or D-natural amino acid and any non-natural amino acid; see specification as filed for detailed description of substitutions, R-groups and preferred embodiments
  MOD_RES (10)..(11): Any L- or D-natural amino acid and any non-natural amino acid; see specification as filed for detailed description of substitutions, R-groups and preferred embodiments
  MOD_RES (14)..(14): Any L- or D-natural amino acid and any non-natural amino acid; see specification as filed for detailed description of substitutions, R-groups and preferred embodiments
  MOD_RES (15)..(18): Any L- or D-natural or non-natural amino acid, and this range may encompass 1 or 4 residues; see specification as filed for detailed description of substitutions, R-groups and preferred embodiments
  c-term may be amidated
KSMQVXFSRXXFSXXXXXTVGWVERHRKMLR

SEQ ID NO: 1146 - protein, 31 aa, Artificial Sequence
  Description of Artificial Sequence: Synthetic peptide
  MOD_RES (7)..(7): Any L- or D-natural amino acid and any non-natural amino acid; see specification as filed for detailed description of substitutions, R-groups and preferred embodiments
  MOD_RES (10)..(11): Any L- or D-natural amino acid and any non-natural amino acid; see specification as filed for detailed description of substitutions, R-groups and preferred embodiments
  MOD_RES (14)..(14): Any L- or D-natural amino acid and any non-natural amino acid; see specification as filed for detailed description of substitutions, R-groups and preferred embodiments
  MOD_RES (15)..(18): Any L- or D-natural or non-natural amino acid, and this range may encompass 1 or 4 residues; see specification as filed for detailed description of substitutions, R-groups and preferred embodiments
  c-term may be amidated
KSMQVPXSRXXFSXXXXXTVGWVERHRKMLR

SEQ ID NO: 1147 - protein, 31 aa, Artificial Sequence
  Description of Artificial Sequence: Synthetic peptide
  MOD_RES (8)..(8): Any L- or D-natural amino acid and any non-natural amino acid; see specification as filed for detailed description of substitutions, R-groups and preferred embodiments
  MOD_RES (10)..(11): Any L- or D-natural amino acid and any non-natural amino acid; see specification as filed for detailed description of substitutions, R-groups and preferred embodiments
  MOD_RES (14)..(14): Any L- or D-natural amino acid and any non-natural amino acid; see specification as filed for detailed description of substitutions, R-groups and preferred embodiments
  MOD_RES (15)..(18): Any L- or D-natural or non-natural amino acid, and this range may encompass 1 or 4 residues; see specification as filed for detailed description of substitutions, R-groups and preferred embodiments
  c-term may be amidated
KSMQVPFXRXXFSXXXXXTVGWVERHRKMLR

SEQ ID NO: 1148 - protein, 31 aa, Artificial Sequence
  Description of Artificial Sequence: Synthetic peptide
  MOD_RES (9)..(11): Any L- or D-natural amino acid and any non-natural amino acid; see specification as filed for detailed description of substitutions, R-groups and preferred embodiments
  MOD_RES (14)..(14): Any L- or D-natural amino acid and any non-natural amino acid; see specification as filed for detailed description of substitutions, R-groups and preferred embodiments
  MOD_RES (15)..(18): Any L- or D-natural or non-natural amino acid, and this range may encompass 1 or 4 residues; see specification as filed for detailed description of substitutions, R-groups and preferred embodiments
  c-term may be amidated
KSMQVPFSXXXFSXXXXXTVGWVERHRKMLR

SEQ ID NO: 1149 - protein, 34 aa, Artificial Sequence
  Description of Artificial Sequence: Synthetic peptide
  MOD_RES (18)..(21): Any L- or D-natural or non-natural amino acid, and this range may encompass 1 or 4 residues; see specification as filed for detailed description of substitutions, R-groups and preferred embodiments
  c-term may be amidated
KSMQVPFSRCCFSFAEQXXXXTVGWVERHRKMLR

SEQ ID NO: 1150 - protein, 34 aa, Artificial Sequence
  Description of Artificial Sequence: Synthetic peptide
  MOD_RES (10)..(11): Any L- or D-natural amino acid and any non-natural amino acid; see specification as filed for detailed description of substitutions, R-groups and preferred embodiments
  MOD_RES (18)..(21): Any L- or D-natural or non-natural amino acid, and this range may encompass 1 or 4 residues; see specification as filed for detailed description of substitutions, R-groups and preferred embodiments
  c-term may be amidated
KSMQVPFSRXXFSFAEQXXXXTVGWVERHRKMLR

SEQ ID NO: 1151 - protein, 34 aa, Artificial Sequence
  Description of Artificial Sequence: Synthetic peptide
  MOD_RES (1)..(1): Any L- or D-natural amino acid and any non-natural amino acid; see specification as filed for detailed description of substitutions, R-groups and preferred embodiments
  MOD_RES (10)..(11): Any L- or D-natural amino acid and any non-natural amino acid; see specification as filed for detailed description of substitutions, R-groups and preferred embodiments
  MOD_RES (18)..(21): Any L- or D-natural or non-natural amino acid, and this range may encompass 1 or 4 residues; see specification as filed for detailed description of substitutions, R-groups and preferred embodiments
  c-term may be amidated
XSMQVPFSRXXFSFAEQXXXXTVGWVERHRKMLR

SEQ ID NO: 1152 - protein, 34 aa, Artificial Sequence
  Description of Artificial Sequence: Synthetic peptide
  MOD_RES (2)..(2): Any L- or D-natural amino acid and any non-natural amino acid; see specification as filed for detailed description of substitutions, R-groups and preferred embodiments
  MOD_RES (10)..(11): Any L- or D-natural amino acid and any non-natural amino acid; see specification as filed for detailed description of substitutions, R-groups and preferred embodiments
  MOD_RES (18)..(21): Any L- or D-natural or non-natural amino acid, and this range may encompass 1 or 4 residues; see specification as filed for detailed description of substitutions, R-groups and preferred embodiments
  c-term may be amidated
KXMQVPFSRXXFSFAEQXXXXTVGWVERHRKMLR

SEQ ID NO: 1153 - protein, 34 aa, Artificial Sequence
  Description of Artificial Sequence: Synthetic peptide
  MOD_RES (3)..(3): Any L- or D-natural amino acid and any non-natural amino acid; see specification as filed for detailed description of substitutions, R-groups and preferred embodiments
  MOD_RES (10)..(11): Any L- or D-natural amino acid and any non-natural amino acid; see specification as filed for detailed description of substitutions, R-groups and preferred embodiments
  MOD_RES (18)..(21): Any L- or D-natural or non-natural amino acid, and this range may encompass 1 or 4 residues; see specification as filed for detailed description of substitutions, R-groups and preferred embodiments
  c-term may be amidated
KSXQVPFSRXXFSFAEQXXXXTVGWVERHRKMLR

SEQ ID NO: 1154 - protein, 34 aa, Artificial Sequence
  Description of Artificial Sequence: Synthetic peptide
  MOD_RES (4)..(4): Any L- or D-natural amino acid and any non-natural amino acid; see specification as filed for detailed description of substitutions, R-groups and preferred embodiments
  MOD_RES (10)..(11): Any L- or D-natural amino acid and any non-natural amino acid; see specification as filed for detailed description of substitutions, R-groups and preferred embodiments
  MOD_RES (18)..(21): Any L- or D-natural or non-natural amino acid, and this range may encompass 1 or 4 residues; see specification as filed for detailed description of substitutions, R-groups and preferred embodiments
  c-term may be amidated
KSMXVPFSRXXFSFAEQXXXXTVGWVERHRKMLR

SEQ ID NO: 1155 - protein, 34 aa, Artificial Sequence
  Description of Artificial Sequence: Synthetic peptide
  MOD_RES (5)..(5): Any L- or D-natural amino acid and any non-natural amino acid; see specification as filed for detailed description of substitutions, R-groups and preferred embodiments
  MOD_RES (10)..(11): Any L- or D-natural amino acid and any non-natural amino acid; see specification as filed for detailed description of substitutions, R-groups and preferred embodiments
  MOD_RES (18)..(21): Any L- or D-natural or non-natural amino acid, and this range may encompass 1 or 4 residues; see specification as filed for detailed description of substitutions, R-groups and preferred embodiments
  c-term may be amidated
KSMQXPFSRXXFSFAEQXXXXTVGWVERHRKMLR

SEQ ID NO: 1156 - protein, 34 aa, Artificial Sequence
  Description of Artificial Sequence: Synthetic peptide
  MOD_RES (6)..(6): Any L- or D-natural amino acid and any non-natural amino acid; see specification as filed for detailed description of substitutions, R-groups and preferred embodiments
  MOD_RES (10)..(11): Any L- or D-natural amino acid and any non-natural amino acid; see specification as filed for detailed description of substitutions, R-groups and preferred embodiments
  MOD_RES (18)..(21): Any L- or D-natural or non-natural amino acid, and this range may encompass 1 or 4 residues; see specification as filed for detailed description of substitutions, R-groups and preferred embodiments
  c-term may be amidated
KSMQVXFSRXXFSFAEQXXXXTVGWVERHRKMLR

SEQ ID NO: 1157 - protein, 34 aa, Artificial Sequence
  Description of Artificial Sequence: Synthetic peptide
  MOD_RES (7)..(7): Any L- or D-natural amino acid and any non-natural amino acid; see specification as filed for detailed description of substitutions, R-groups and preferred embodiments
  MOD_RES (10)..(11): Any L- or D-natural amino acid and any non-natural amino acid; see specification as filed for detailed description of substitutions, R-groups and preferred embodiments
  MOD_RES (18)..(21): Any L- or D-natural or non-natural amino acid, and this range may encompass 1 or 4 residues; see specification as filed for detailed description of substitutions, R-groups and preferred embodiments
  c-term may be amidated
KSMQVPXSRXXFSFAEQXXXXTVGWVERHRKMLR

SEQ ID NO: 1158 - protein, 34 aa, Artificial Sequence
  Description of Artificial Sequence: Synthetic peptide
  MOD_RES (8)..(8): Any L- or D-natural amino acid and any non-natural amino acid; see specification as filed for detailed description of substitutions, R-groups and preferred embodiments
  MOD_RES (10)..(11): Any L- or D-natural amino acid and any non-natural amino acid; see specification as filed for detailed description of substitutions, R-groups and preferred embodiments
  MOD_RES (18)..(21): Any L- or D-natural or non-natural amino acid, and this range may encompass 1 or 4 residues; see specification as filed for detailed description of substitutions, R-groups and preferred embodiments
  c-term may be amidated
KSMQVPFXRXXFSFAEQXXXXTVGWVERHRKMLR

SEQ ID NO: 1159 - protein, 34 aa, Artificial Sequence
  Description of Artificial Sequence: Synthetic peptide
  MOD_RES (9)..(11): Any L- or D-natural amino acid and any non-natural amino acid; see specification as filed for detailed description of substitutions, R-groups and preferred embodiments
  MOD_RES (18)..(21): Any L- or D-natural or non-natural amino acid, and this range may encompass 1 or 4 residues; see specification as filed for detailed description of substitutions, R-groups and preferred embodiments
  c-term may be amidated
KSMQVPFSXXXFSFAEQXXXXTVGWVERHRKMLR

SEQ ID NO: 1160 - protein, 34 aa, Artificial Sequence
  Description of Artificial Sequence: Synthetic peptide
  MOD_RES (12)..(12): Any L- or D-natural amino acid and any non-natural amino acid; see specification as filed for detailed description of substitutions, R-groups and preferred embodiments
  MOD_RES (18)..(21): Any L- or D-natural or non-natural amino acid, and this range may encompass 1 or 4 residues; see specification as filed for detailed description of substitutions, R-groups and preferred embodiments
  c-term may be amidated
KSMQVPFSRCCXSFAEQXXXXTVGWVERHRKMLR

SEQ ID NO: 1161 - protein, 34 aa, Artificial Sequence
  Description of Artificial Sequence: Synthetic peptide
  MOD_RES (10)..(12): Any L- or D-natural amino acid and any non-natural amino acid; see specification as filed for detailed description of substitutions, R-groups and preferred embodiments
  MOD_RES (18)..(21): Any L- or D-natural or non-natural amino acid, and this range may encompass 1 or 4 residues; see specification as filed for detailed description of substitutions, R-groups and preferred embodiments
  c-term may be amidated
KSMQVPFSRXXXSFAEQXXXXTVGWVERHRKMLR

SEQ ID NO: 1162 - protein, 34 aa, Artificial Sequence
  Description of Artificial Sequence: Synthetic peptide
  MOD_RES (1)..(1): Any L- or D-natural amino acid and any non-natural amino acid; see specification as filed for detailed description of substitutions, R-groups and preferred embodiments
  MOD_RES (10)..(12): Any L- or D-natural amino acid and any non-natural amino acid; see specification as filed for detailed description of substitutions, R-groups and preferred embodiments
  MOD_RES (18)..(21): Any L- or D-natural or non-natural amino acid, and this range may encompass 1 or 4 residues; see specification as filed for detailed description of substitutions, R-groups and preferred embodiments
  c-term may be amidated
XSMQVPFSRXXXSFAEQXXXXTVGWVERHRKMLR

SEQ ID NO: 1163 - protein, 34 aa, Artificial Sequence
  Description of Artificial Sequence: Synthetic peptide
  MOD_RES (2)..(2): Any L- or D-natural amino acid and any non-natural amino acid; see specification as filed for detailed description of substitutions, R-groups and preferred embodiments
  MOD_RES (10)..(12): Any L- or D-natural amino acid and any non-natural amino acid; see specification as filed for detailed description of substitutions, R-groups and preferred embodiments
  MOD_RES (18)..(21): Any L- or D-natural or non-natural amino acid, and this range may encompass 1 or 4 residues; see specification as filed for detailed description of substitutions, R-groups and preferred embodiments
  c-term may be amidated
KXMQVPFSRXXXSFAEQXXXXTVGWVERHRKMLR

SEQ ID NO: 1164 - protein, 34 aa, Artificial Sequence
  Description of Artificial Sequence: Synthetic peptide
  MOD_RES (3)..(3): Any L- or D-natural amino acid and any non-natural amino acid; see specification as filed for detailed description of substitutions, R-groups and preferred embodiments
  MOD_RES (10)..(12): Any L- or D-natural amino acid and any non-natural amino acid; see specification as filed for detailed description of substitutions, R-groups and preferred embodiments
  MOD_RES (18)..(21): Any L- or D-natural or non-natural amino acid, and this range may encompass 1 or 4 residues; see specification as filed for detailed description of substitutions, R-groups and preferred embodiments
  c-term may be amidated
KSXQVPFSRXXXSFAEQXXXXTVGWVERHRKMLR

SEQ ID NO: 1165 - protein, 34 aa, Artificial Sequence
  Description of Artificial Sequence: Synthetic peptide
  MOD_RES (4)..(4): Any L- or D-natural amino acid and any non-natural amino acid; see specification as filed for detailed description of substitutions, R-groups and preferred embodiments
  MOD_RES (10)..(12): Any L- or D-natural amino acid and any non-natural amino acid; see specification as filed for detailed description of substitutions, R-groups and preferred embodiments
  MOD_RES (18)..(21): Any L- or D-natural or non-natural amino acid, and this range may encompass 1 or 4 residues; see specification as filed for detailed description of substitutions, R-groups and preferred embodiments
  c-term may be amidated
KSMXVPFSRXXXSFAEQXXXXTVGWVERHRKMLR

SEQ ID NO: 1166 - protein, 34 aa, Artificial Sequence
  Description of Artificial Sequence: Synthetic peptide
  MOD_RES (5)..(5): Any L- or D-natural amino acid and any non-natural amino acid; see specification as filed for detailed description of substitutions, R-groups and preferred embodiments
  MOD_RES (10)..(12): Any L- or D-natural amino acid and any non-natural amino acid; see specification as filed for detailed description of substitutions, R-groups and preferred embodiments
  MOD_RES (18)..(21): Any L- or D-natural or non-natural amino acid, and this range may encompass 1 or 4 residues; see specification as filed for detailed description of substitutions, R-groups and preferred embodiments
  c-term may be amidated
KSMQXPFSRXXXSFAEQXXXXTVGWVERHRKMLR

SEQ ID NO: 1167 - protein, 34 aa, Artificial Sequence
  Description of Artificial Sequence: Synthetic peptide
  MOD_RES (6)..(6): Any L- or D-natural amino acid and any non-natural amino acid; see specification as filed for detailed description of substitutions, R-groups and preferred embodiments
  MOD_RES (10)..(12): Any L- or D-natural amino acid and any non-natural amino acid; see specification as filed for detailed description of substitutions, R-groups and preferred embodiments
  MOD_RES (18)..(21): Any L- or D-natural or non-natural amino acid, and this range may encompass 1 or 4 residues; see specification as filed for detailed description of substitutions, R-groups and preferred embodiments
  c-term may be amidated
KSMQVXFSRXXXSFAEQXXXXTVGWVERHRKMLR

SEQ ID NO: 1168 - protein, 34 aa, Artificial Sequence
  Description of Artificial Sequence: Synthetic peptide
  MOD_RES (7)..(7): Any L- or D-natural amino acid and any non-natural amino acid; see specification as filed for detailed description of substitutions, R-groups and preferred embodiments
  MOD_RES (10)..(12): Any L- or D-natural amino acid and any non-natural amino acid; see specification as filed for detailed description of substitutions, R-groups and preferred embodiments
  MOD_RES (18)..(21): Any L- or D-natural or non-natural amino acid, and this range may encompass 1 or 4 residues; see specification as filed for detailed description of substitutions, R-groups and preferred embodiments
  c-term may be amidated
KSMQVPXSRXXXSFAEQXXXXTVGWVERHRKMLR

SEQ ID NO: 1169 - protein, 34 aa, Artificial Sequence
  Description of Artificial Sequence: Synthetic peptide
  MOD_RES (8)..(8): Any L- or D-natural amino acid and any non-natural amino acid; see specification as filed for detailed description of substitutions, R-groups and preferred embodiments
  MOD_RES (10)..(12): Any L- or D-natural amino acid and any non-natural amino acid; see specification as filed for detailed description of substitutions, R-groups and preferred embodiments
  MOD_RES (18)..(21): Any L- or D-natural or non-natural amino acid, and this range may encompass 1 or 4 residues; see specification as filed for detailed description of substitutions, R-groups and preferred embodiments
  c-term may be amidated
KSMQVPFXRXXXSFAEQXXXXTVGWVERHRKMLR

SEQ ID NO: 1170 - protein, 34 aa, Artificial Sequence
  Description of Artificial Sequence: Synthetic peptide
  MOD_RES (9)..(12): Any L- or D-natural amino acid and any non-natural amino acid; see specification as filed for detailed description of substitutions, R-groups and preferred embodiments
  MOD_RES (18)..(21): Any L- or D-natural or non-natural amino acid, and this range may encompass 1 or 4 residues; see specification as filed for detailed description of substitutions, R-groups and preferred embodiments
  c-term may be amidated
KSMQVPFSXXXXSFAEQXXXXTVGWVERHRKMLR

SEQ ID NO: 1171 - protein, 34 aa, Artificial Sequence
  Description of Artificial Sequence: Synthetic peptide
  MOD_RES (13)..(13): Any L- or D-natural amino acid and any non-natural amino acid; see specification as filed for detailed description of substitutions, R-groups and preferred embodiments
  MOD_RES (18)..(21): Any L- or D-natural or non-natural amino acid, and this range may encompass 1 or 4 residues; see specification as filed for detailed description of substitutions, R-groups and preferred embodiments
  c-term may be amidated
KSMQVPFSRCCFXFAEQXXXXTVGWVERHRKMLR

SEQ ID NO: 1172 - protein, 34 aa, Artificial Sequence
  Description of Artificial Sequence: Synthetic peptide
  MOD_RES (10)..(11): Any L- or D-natural amino acid and any non-natural amino acid; see specification as filed for detailed description of substitutions, R-groups and preferred embodiments
  MOD_RES (13)..(13): Any L- or D-natural amino acid and any non-natural amino acid; see specification as filed for detailed description of substitutions, R-groups and preferred embodiments
  MOD_RES (18)..(21): Any L- or D-natural or non-natural amino acid, and this range may encompass 1 or 4 residues; see specification as filed for detailed description of substitutions, R-groups and preferred embodiments
  c-term may be amidated
KSMQVPFSRXXFXFAEQXXXXTVGWVERHRKMLR

SEQ ID NO: 1173 - protein, 34 aa, Artificial Sequence
  Description of Artificial Sequence: Synthetic peptide
  MOD_RES (1)..(1): Any L- or D-natural amino acid and any non-natural amino acid; see specification as filed for detailed description of substitutions, R-groups and preferred embodiments
  MOD_RES (10)..(11): Any L- or D-natural amino acid and any non-natural amino acid; see specification as filed for detailed description of substitutions, R-groups and preferred embodiments
  MOD_RES (13)..(13): Any L- or D-natural amino acid and any non-natural amino acid; see specification as filed for detailed description of substitutions, R-groups and preferred embodiments
  MOD_RES (18)..(21): Any L- or D-natural or non-natural amino acid, and this range may encompass 1 or 4 residues; see specification as filed for detailed description of substitutions, R-groups and preferred embodiments
  c-term may be amidated
XSMQVPFSRXXFXFAEQXXXXTVGWVERHRKMLR

SEQ ID NO: 1174 - protein, 34 aa, Artificial Sequence
  Description of Artificial Sequence: Synthetic peptide
  MOD_RES (2)..(2): Any L- or D-natural amino acid and any non-natural amino acid; see specification as filed for detailed description of substitutions, R-groups and preferred embodiments
  MOD_RES (10)..(11): Any L- or D-natural amino acid and any non-natural amino acid; see specification as filed for detailed description of substitutions, R-groups and preferred embodiments
  MOD_RES (13)..(13): Any L- or D-natural amino acid and any non-natural amino acid; see specification as filed for detailed description of substitutions, R-groups and preferred embodiments
  MOD_RES (18)..(21): Any L- or D-natural or non-natural amino acid, and this range may encompass 1 or 4 residues; see specification as filed for detailed description of substitutions, R-groups and preferred embodiments
  c-term may be amidated
KXMQVPFSRXXFXFAEQXXXXTVGWVERHRKMLR

SEQ ID NO: 1175 - protein, 34 aa, Artificial Sequence
  Description of Artificial Sequence: Synthetic peptide
  MOD_RES (3)..(3): Any L- or D-natural amino acid and any non-natural amino acid; see specification as filed for detailed description of substitutions, R-groups and preferred embodiments
  MOD_RES (10)..(11): Any L- or D-natural amino acid and any non-natural amino acid; see specification as filed for detailed description of substitutions, R-groups and preferred embodiments
  MOD_RES (13)..(13): Any L- or D-natural amino acid and any non-natural amino acid; see specification as filed for detailed description of substitutions, R-groups and preferred embodiments
  MOD_RES (18)..(21): Any L- or D-natural or non-natural amino acid, and this range may encompass 1 or 4 residues; see specification as filed for detailed description of substitutions, R-groups and preferred embodiments
  c-term may be amidated
KSXQVPFSRXXFXFAEQXXXXTVGWVERHRKMLR

SEQ ID NO: 1176 - protein, 34 aa, Artificial Sequence
  Description of Artificial Sequence: Synthetic peptide
  MOD_RES (4)..(4): Any L- or D-natural amino acid and any non-natural amino acid; see specification as filed for detailed description of substitutions, R-groups and preferred embodiments
  MOD_RES (10)..(11): Any L- or D-natural amino acid and any non-natural amino acid; see specification as filed for detailed description of substitutions, R-groups and preferred embodiments
  MOD_RES (13)..(13): Any L- or D-natural amino acid and any non-natural amino acid; see specification as filed for detailed description of substitutions, R-groups and preferred embodiments
  MOD_RES (18)..(21): Any L- or D-natural or non-natural amino acid, and this range may encompass 1 or 4 residues; see specification as filed for detailed description of substitutions, R-groups and preferred embodiments
  c-term may be amidated
KSMXVPFSRXXFXFAEQXXXXTVGWVERHRKMLR

SEQ ID NO: 1177 - protein, 34 aa, Artificial Sequence
  Description of Artificial Sequence: Synthetic peptide
  MOD_RES (5)..(5): Any L- or D-natural amino acid and any non-natural amino acid; see specification as filed for detailed description of substitutions, R-groups and preferred embodiments
  MOD_RES (10)..(11): Any L- or D-natural amino acid and any non-natural amino acid; see specification as filed for detailed description of substitutions, R-groups and preferred embodiments
  MOD_RES (13)..(13): Any L- or D-natural amino acid and any non-natural amino acid; see specification as filed for detailed description of substitutions, R-groups and preferred embodiments
  MOD_RES (18)..(21): Any L- or D-natural or non-natural amino acid, and this range may encompass 1 or 4 residues; see specification as filed for detailed description of substitutions, R-groups and preferred embodiments
  c-term may be amidated
KSMQXPFSRXXFXFAEQXXXXTVGWVERHRKMLR

SEQ ID NO: 1178 - protein, 34 aa, Artificial Sequence
  Description of Artificial Sequence: Synthetic peptide
  MOD_RES (6)..(6): Any L- or D-natural amino acid and any non-natural amino acid; see specification as filed for detailed description of substitutions, R-groups and preferred embodiments
  MOD_RES (10)..(11): Any L- or D-natural amino acid and any non-natural amino acid; see specification as filed for detailed description of substitutions, R-groups and preferred embodiments
  MOD_RES (13)..(13): Any L- or D-natural amino acid and any non-natural amino acid; see specification as filed for detailed description of substitutions, R-groups and preferred embodiments
  MOD_RES (18)..(21): Any L- or D-natural or non-natural amino acid, and this range may encompass 1 or 4 residues; see specification as filed for detailed description of substitutions, R-groups and preferred embodiments
  c-term may be amidated
KSMQVXFSRXXFXFAEQXXXXTVGWVERHRKMLR

SEQ ID NO: 1179 - protein, 34 aa, Artificial Sequence
  Description of Artificial Sequence: Synthetic peptide
  MOD_RES (7)..(7): Any L- or D-natural amino acid and any non-natural amino acid; see specification as filed for detailed description of substitutions, R-groups and preferred embodiments
  MOD_RES (10)..(11): Any L- or D-natural amino acid and any non-natural amino acid; see specification as filed for detailed description of substitutions, R-groups and preferred embodiments
  MOD_RES (13)..(13): Any L- or D-natural amino acid and any non-natural amino acid; see specification as filed for detailed description of substitutions, R-groups and preferred embodiments
  MOD_RES (18)..(21): Any L- or D-natural or non-natural amino acid, and this range may encompass 1 or 4 residues; see specification as filed for detailed description of substitutions, R-groups and preferred embodiments
  c-term may be amidated
KSMQVPXSRXXFXFAEQXXXXTVGWVERHRKMLR

SEQ ID NO: 1180 - protein, 34 aa, Artificial Sequence
  Description of Artificial Sequence: Synthetic peptide
  MOD_RES (8)..(8): Any L- or D-natural amino acid and any non-natural amino acid; see specification as filed for detailed description of substitutions, R-groups and preferred embodiments
  MOD_RES (10)..(11): Any L- or D-natural amino acid and any non-natural amino acid; see specification as filed for detailed description of substitutions, R-groups and preferred embodiments
  MOD_RES (13)..(13): Any L- or D-natural amino acid and any non-natural amino acid; see specification as filed for detailed description of substitutions, R-groups and preferred embodiments
  MOD_RES (18)..(21): Any L- or D-natural or non-natural amino acid, and this range may encompass 1 or 4 residues; see specification as filed for detailed description of substitutions, R-groups and preferred embodiments
  c-term may be amidated
KSMQVPFXRXXFXFAEQXXXXTVGWVERHRKMLR

SEQ ID NO: 1181 - protein, 34 aa, Artificial Sequence
  Description of Artificial Sequence: Synthetic peptide
  MOD_RES (9)..(11): Any L- or D-natural amino acid and any non-natural amino acid; see specification as filed for detailed description of substitutions, R-groups and preferred embodiments
  MOD_RES (13)..(13): Any L- or D-natural amino acid and any non-natural amino acid; see specification as filed for detailed description of substitutions, R-groups and preferred embodiments
  MOD_RES (18)..(21): Any L- or D-natural or non-natural amino acid, and this range may encompass 1 or 4 residues; see specification as filed for detailed description of substitutions, R-groups and preferred embodiments
  c-term may be amidated
KSMQVPFSXXXFXFAEQXXXXTVGWVERHRKMLR

SEQ ID NO: 1182 - protein, 34 aa, Artificial Sequence
  Description of Artificial Sequence: Synthetic peptide
  MOD_RES (14)..(14): Any L- or D-natural amino acid and any non-natural amino acid; see specification as filed for detailed description of substitutions, R-groups and preferred embodiments
  MOD_RES (18)..(21): Any L- or D-natural or non-natural amino acid, and this range may encompass 1 or 4 residues; see specification as filed for detailed description of substitutions, R-groups and preferred embodiments
  c-term may be amidated
KSMQVPFSRCCFSXAEQXXXXTVGWVERHRKMLR

SEQ ID NO: 1183 - protein, 34 aa, Artificial Sequence
  Description of Artificial Sequence: Synthetic peptide
  MOD_RES (10)..(11): Any L- or D-natural amino acid and any non-natural amino acid; see specification as filed for detailed description of substitutions, R-groups and preferred embodiments
  MOD_RES (14)..(14): Any L- or D-natural amino acid and any non-natural amino acid; see specification as filed for detailed description of substitutions, R-groups and preferred embodiments
  MOD_RES (18)..(21): Any L- or D-natural or non-natural amino acid, and this range may encompass 1 or 4 residues; see specification as filed for detailed description of substitutions, R-groups and preferred embodiments
  c-term may be amidated
KSMQVPFSRXXFSXAEQXXXXTVGWVERHRKMLR

SEQ ID NO: 1184 - protein, 34 aa, Artificial Sequence
  Description of Artificial Sequence: Synthetic peptide
  MOD_RES (1)..(1): Any L- or D-natural amino acid and any non-natural amino acid; see specification as filed for detailed description of substitutions, R-groups and preferred embodiments
  MOD_RES (10)..(11): Any L- or D-natural amino acid and any non-natural amino acid; see specification as filed for detailed description of substitutions, R-groups and preferred embodiments
  MOD_RES (14)..(14): Any L- or D-natural amino acid and any non-natural amino acid; see specification as filed for detailed description of substitutions, R-groups and preferred embodiments
  MOD_RES (18)..(21): Any L- or D-natural or non-natural amino acid, and this range may encompass 1 or 4 residues; see specification as filed for detailed description of substitutions, R-groups and preferred embodiments
  c-term may be amidated
XSMQVPFSRXXFSXAEQXXXXTVGWVERHRKMLR

SEQ ID NO: 1185 - protein, 34 aa, Artificial Sequence
  Description of Artificial Sequence: Synthetic peptide
  MOD_RES (2)..(2): Any L- or D-natural amino acid and any non-natural amino acid; see specification as filed for detailed description of substitutions, R-groups and preferred embodiments
  MOD_RES (10)..(11): Any L- or D-natural amino acid and any non-natural amino acid; see specification as filed for detailed description of substitutions, R-groups and preferred embodiments
  MOD_RES (14)..(14): Any L- or D-natural amino acid and any non-natural amino acid; see specification as filed for detailed description of substitutions, R-groups and preferred embodiments
  MOD_RES (18)..(21): Any L- or D-natural or non-natural amino acid, and this range may encompass 1 or 4 residues; see specification as filed for detailed description of substitutions, R-groups and preferred embodiments
  c-term may be amidated
KXMQVPFSRXXFSXAEQXXXXTVGWVERHRKMLR

SEQ ID NO: 1186 - protein, 34 aa, Artificial Sequence
  Description of Artificial Sequence: Synthetic peptide
  MOD_RES (3)..(3): Any L- or D-natural amino acid and any non-natural amino acid; see specification as filed for detailed description of substitutions, R-groups and preferred embodiments
  MOD_RES (10)..(11): Any L- or D-natural amino acid and any non-natural amino acid; see specification as filed for detailed description of substitutions, R-groups and preferred embodiments
  MOD_RES (14)..(14): Any L- or D-natural amino acid and any non-natural amino acid; see specification as filed for detailed description of substitutions, R-groups and preferred embodiments
  MOD_RES (18)..(21): Any L- or D-natural or non-natural amino acid, and this range may encompass 1 or 4 residues; see specification as filed for detailed description of substitutions, R-groups and preferred embodiments
  c-term may be amidated
KSXQVPFSRXXFSXAEQXXXXTVGWVERHRKMLR

SEQ ID NO: 1187 - protein, 34 aa, Artificial Sequence
  Description of Artificial Sequence: Synthetic peptide
  MOD_RES (4)..(4): Any L- or D-natural amino acid and any non-natural amino acid; see specification as filed for detailed description of substitutions, R-groups and preferred embodiments
  MOD_RES (10)..(11): Any L- or D-natural amino acid and any non-natural amino acid; see specification as filed for detailed description of substitutions, R-groups and preferred embodiments
  MOD_RES (14)..(14): Any L- or D-natural amino acid and any non-natural amino acid; see specification as filed for detailed description of substitutions, R-groups and preferred embodiments
  MOD_RES (18)..(21): Any L- or D-natural or non-natural amino acid, and this range may encompass 1 or 4 residues; see specification as filed for detailed description of substitutions, R-groups and preferred embodiments
  c-term may be amidated
KSMXVPFSRXXFSXAEQXXXXTVGWVERHRKMLR

SEQ ID NO: 1188 - protein, 34 aa, Artificial Sequence
  Description of Artificial Sequence: Synthetic peptide
  MOD_RES (5)..(5): Any L- or D-natural amino acid and any non-natural amino acid; see specification as filed for detailed description of substitutions, R-groups and preferred embodiments
  MOD_RES (10)..(11): Any L- or D-natural amino acid and any non-natural amino acid; see specification as filed for detailed description of substitutions, R-groups and preferred embodiments
  MOD_RES (14)..(14): Any L- or D-natural amino acid and any non-natural amino acid; see specification as filed for detailed description of substitutions, R-groups and preferred embodiments
  MOD_RES (18)..(21): Any L- or D-natural or non-natural amino acid, and this range may encompass 1 or 4 residues; see specification as filed for detailed description of substitutions, R-groups and preferred embodiments
  c-term may be amidated
KSMQXPFSRXXFSXAEQXXXXTVGWVERHRKMLR

SEQ ID NO: 1189 - protein, 34 aa, Artificial Sequence
  Description of Artificial Sequence: Synthetic peptide
  MOD_RES (6)..(6): Any L- or D-natural amino acid and any non-natural amino acid; see specification as filed for detailed description of substitutions, R-groups and preferred embodiments
  MOD_RES (10)..(11): Any L- or D-natural amino acid and any non-natural amino acid; see specification as filed for detailed description of substitutions, R-groups and preferred embodiments
  MOD_RES (14)..(14): Any L- or D-natural amino acid and any non-natural amino acid; see specification as filed for detailed description of substitutions, R-groups and preferred embodiments
  MOD_RES (18)..(21): Any L- or D-natural or non-natural amino acid, and this range may encompass 1 or 4 residues; see specification as filed for detailed description of substitutions, R-groups and preferred embodiments
  c-term may be amidated
KSMQVXFSRXXFSXAEQXXXXTVGWVERHRKMLR

SEQ ID NO: 1190 - protein, 34 aa, Artificial Sequence
  Description of Artificial Sequence: Synthetic peptide
  MOD_RES (7)..(7): Any L- or D-natural amino acid and any non-natural amino acid; see specification as filed for detailed description of substitutions, R-groups and preferred embodiments
  MOD_RES (10)..(11): Any L- or D-natural amino acid and any non-natural amino acid; see specification as filed for detailed description of substitutions, R-groups and preferred embodiments
  MOD_RES (14)..(14): Any L- or D-natural amino acid and any non-natural amino acid; see specification as filed for detailed description of substitutions, R-groups and preferred embodiments
  MOD_RES (18)..(21): Any L- or D-natural or non-natural amino acid, and this range may encompass 1 or 4 residues; see specification as filed for detailed description of substitutions, R-groups and preferred embodiments
  c-term may be amidated
KSMQVPXSRXXFSXAEQXXXXTVGWVERHRKMLR

SEQ ID NO: 1191 - protein, 34 aa, Artificial Sequence
  Description of Artificial Sequence: Synthetic peptide
  MOD_RES (8)..(8): Any L- or D-natural amino acid and any non-natural amino acid; see specification as filed for detailed description of substitutions, R-groups and preferred embodiments
  MOD_RES (10)..(11): Any L- or D-natural amino acid and any non-natural amino acid; see specification as filed for detailed description of substitutions, R-groups and preferred embodiments
  MOD_RES (14)..(14): Any L- or D-natural amino acid and any non-natural amino acid; see specification as filed for detailed description of substitutions, R-groups and preferred embodiments
  MOD_RES (18)..(21): Any L- or D-natural or non-natural amino acid, and this range may encompass 1 or 4 residues; see specification as filed for detailed description of substitutions, R-groups and preferred embodiments
  c-term may be amidated
KSMQVPFXRXXFSXAEQXXXXTVGWVERHRKMLR

SEQ ID NO: 1192 - protein, 34 aa, Artificial Sequence
  Description of Artificial Sequence: Synthetic peptide
  MOD_RES (9)..(11): Any L- or D-natural amino acid and any non-natural amino acid; see specification as filed for detailed description of substitutions, R-groups and preferred embodiments
  MOD_RES (14)..(14): Any L- or D-natural amino acid and any non-natural amino acid; see specification as filed for detailed description of substitutions, R-groups and preferred embodiments
  MOD_RES (18)..(21): Any L- or D-natural or non-natural amino acid, and this range may encompass 1 or 4 residues; see specification as filed for detailed description of substitutions, R-groups and preferred embodiments
  c-term may be amidated
KSMQVPFSXXXFSXAEQXXXXTVGWVERHRKMLR

SEQ ID NO: 1193 - protein, 34 aa, Artificial Sequence
  Description of Artificial Sequence: Synthetic peptide
  MOD_RES (15)..(15): Any L- or D-natural amino acid and any non-natural amino acid; see specification as filed for detailed description of substitutions, R-groups and preferred embodiments
  MOD_RES (18)..(21): Any L- or D-natural or non-natural amino acid, and this range may encompass 1 or 4 residues; see specification as filed for detailed description of substitutions, R-groups and preferred embodiments
  c-term may be amidated
KSMQVPFSRCCFSFXEQXXXXTVGWVERHRKMLR

SEQ ID NO: 1194 - protein, 34 aa, Artificial Sequence
  Description of Artificial Sequence: Synthetic peptide
  MOD_RES (10)..(11): Any L- or D-natural amino acid and any non-natural amino acid; see specification as filed for detailed description of substitutions, R-groups and preferred embodiments
  MOD_RES (15)..(15): Any L- or D-natural amino acid and any non-natural amino acid; see specification as filed for detailed description of substitutions, R-groups and preferred embodiments
  MOD_RES (18)..(21): Any L- or D-natural or non-natural amino acid, and this range may encompass 1 or 4 residues; see specification as filed for detailed description of substitutions, R-groups and preferred embodiments
  c-term may be amidated
KSMQVPFSRXXFSFXEQXXXXTVGWVERHRKMLR

SEQ ID NO: 1195 - protein, 34 aa, Artificial Sequence
  Description of Artificial Sequence: Synthetic peptide
  MOD_RES (1)..(1): Any L- or D-natural amino acid and any non-natural amino acid; see specification as filed for detailed description of substitutions, R-groups and preferred embodiments
  MOD_RES (10)..(11): Any L- or D-natural amino acid and any non-natural amino acid; see specification as filed for detailed description of substitutions, R-groups and preferred embodiments
  MOD_RES (15)..(15): Any L- or D-natural amino acid and any non-natural amino acid; see specification as filed for detailed description of substitutions, R-groups and preferred embodiments
  MOD_RES (18)..(21): Any L- or D-natural or non-natural amino acid, and this range may encompass 1 or 4 residues; see specification as filed for detailed description of substitutions, R-groups and preferred embodiments
  c-term may be amidated
XSMQVPFSRXXFSFXEQXXXXTVGWVERHRKMLR

SEQ ID NO: 1196 - protein, 34 aa, Artificial Sequence
  Description of Artificial Sequence: Synthetic peptide
  MOD_RES (2)..(2): Any L- or D-natural amino acid and any non-natural amino acid; see specification as filed for detailed description of substitutions, R-groups and preferred embodiments
  MOD_RES (10)..(11): Any L- or D-natural amino acid and any non-natural amino acid; see specification as filed for detailed description of substitutions, R-groups and preferred embodiments
  MOD_RES (15)..(15): Any L- or D-natural amino acid and any non-natural amino acid; see specification as filed for detailed description of substitutions, R-groups and preferred embodiments
  MOD_RES (18)..(21): Any L- or D-natural or non-natural amino acid, and this range may encompass 1 or 4 residues; see specification as filed for detailed description of substitutions, R-groups and preferred embodiments
  c-term may be amidated
KXMQVPFSRXXFSFXEQXXXXTVGWVERHRKMLR

SEQ ID NO: 1197 - protein, 34 aa, Artificial Sequence
  Description of Artificial Sequence: Synthetic peptide
  MOD_RES (3)..(3): Any L- or D-natural amino acid and any non-natural amino acid; see specification as filed for detailed description of substitutions, R-groups and preferred embodiments
  MOD_RES (10)..(11): Any L- or D-natural amino acid and any non-natural amino acid; see specification as filed for detailed description of substitutions, R-groups and preferred embodiments
  MOD_RES (15)..(15): Any L- or D-natural amino acid and any non-natural amino acid; see specification as filed for detailed description of substitutions, R-groups and preferred embodiments
  MOD_RES (18)..(21): Any L- or D-natural or non-natural amino acid, and this range may encompass 1 or 4 residues; see specification as filed for detailed description of substitutions, R-groups and preferred embodiments
  c-term may be amidated
KSXQVPFSRXXFSFXEQXXXXTVGWVERHRKMLR

SEQ ID NO: 1198 - protein, 34 aa, Artificial Sequence
  Description of Artificial Sequence: Synthetic peptide
  MOD_RES (4)..(4): Any L- or D-natural amino acid and any non-natural amino acid; see specification as filed for detailed description of substitutions, R-groups and preferred embodiments
  MOD_RES (10)..(11): Any L- or D-natural amino acid and any non-natural amino acid; see specification as filed for detailed description of substitutions, R-groups and preferred embodiments
  MOD_RES (15)..(15): Any L- or D-natural amino acid and any non-natural amino acid; see specification as filed for detailed description of substitutions, R-groups and preferred embodiments
  MOD_RES (18)..(21): Any L- or D-natural or non-natural amino acid, and this range may encompass 1 or 4 residues; see specification as filed for detailed description of substitutions, R-groups and preferred embodiments
  c-term may be amidated
KSMXVPFSRXXFSFXEQXXXXTVGWVERHRKMLR

SEQ ID NO: 1199 - protein, 34 aa, Artificial Sequence
  Description of Artificial Sequence: Synthetic peptide
  MOD_RES (5)..(5): Any L- or D-natural amino acid and any non-natural amino acid; see specification as filed for detailed description of substitutions, R-groups and preferred embodiments
  MOD_RES (10)..(11): Any L- or D-natural amino acid and any non-natural amino acid; see specification as filed for detailed description of substitutions, R-groups and preferred embodiments
  MOD_RES (15)..(15): Any L- or D-natural amino acid and any non-natural amino acid; see specification as filed for detailed description of substitutions, R-groups and preferred embodiments
  MOD_RES (18)..(21): Any L- or D-natural or non-natural amino acid, and this range may encompass 1 or 4 residues; see specification as filed for detailed description of substitutions, R-groups and preferred embodiments
  c-term may be amidated
KSMQXPFSRXXFSFXEQXXXXTVGWVERHRKMLR

SEQ ID NO: 1200 - protein, 34 aa, Artificial Sequence
  Description of Artificial Sequence: Synthetic peptide
  MOD_RES (6)..(6): Any L- or D-natural amino acid and any non-natural amino acid; see specification as filed for detailed description of substitutions, R-groups and preferred embodiments
  MOD_RES (10)..(11): Any L- or D-natural amino acid and any non-natural amino acid; see specification as filed for detailed description of substitutions, R-groups and preferred embodiments
  MOD_RES (15)..(15): Any L- or D-natural amino acid and any non-natural amino acid; see specification as filed for detailed description of substitutions, R-groups and preferred embodiments
  MOD_RES (18)..(21): Any L- or D-natural or non-natural amino acid, and this range may encompass 1 or 4 residues; see specification as filed for detailed description of substitutions, R-groups and preferred embodiments
  c-term may be amidated
KSMQVXFSRXXFSFXEQXXXXTVGWVERHRKMLR

SEQ ID NO: 1201 - protein, 34 aa, Artificial Sequence
  Description of Artificial Sequence: Synthetic peptide
  MOD_RES (7)..(7): Any L- or D-natural amino acid and any non-natural amino acid; see specification as filed for detailed description of substitutions, R-groups and preferred embodiments
  MOD_RES (10)..(11): Any L- or D-natural amino acid and any non-natural amino acid; see specification as filed for detailed description of substitutions, R-groups and preferred embodiments
  MOD_RES (15)..(15): Any L- or D-natural amino acid and any non-natural amino acid; see specification as filed for detailed description of substitutions, R-groups and preferred embodiments
  MOD_RES (18)..(21): Any L- or D-natural or non-natural amino acid, and this range may encompass 1 or 4 residues; see specification as filed for detailed description of substitutions, R-groups and preferred embodiments
  c-term may be amidated
KSMQVPXSRXXFSFXEQXXXXTVGWVERHRKMLR

SEQ ID NO: 1202 - protein, 34 aa, Artificial Sequence
  Description of Artificial Sequence: Synthetic peptide
  MOD_RES (8)..(8): Any L- or D-natural amino acid and any non-natural amino acid; see specification as filed for detailed description of substitutions, R-groups and preferred embodiments
  MOD_RES (10)..(11): Any L- or D-natural amino acid and any non-natural amino acid; see specification as filed for detailed description of substitutions, R-groups and preferred embodiments
  MOD_RES (15)..(15): Any L- or D-natural amino acid and any non-natural amino acid; see specification as filed for detailed description of substitutions, R-groups and preferred embodiments
  MOD_RES (18)..(21): Any L- or D-natural or non-natural amino acid, and this range may encompass 1 or 4 residues; see specification as filed for detailed description of substitutions, R-groups and preferred embodiments
  c-term may be amidated
KSMQVPFXRXXFSFXEQXXXXTVGWVERHRKMLR

SEQ ID NO: 1203 - protein, 34 aa, Artificial Sequence
  Description of Artificial Sequence: Synthetic peptide
  MOD_RES (9)..(11): Any L- or D-natural amino acid and any non-natural amino acid; see specification as filed for detailed description of substitutions, R-groups and preferred embodiments
  MOD_RES (15)..(15): Any L- or D-natural amino acid and any non-natural amino acid; see specification as filed for detailed description of substitutions, R-groups and preferred embodiments
  MOD_RES (18)..(21): Any L- or D-natural or non-natural amino acid, and this range may encompass 1 or 4 residues; see specification as filed for detailed description of substitutions, R-groups and preferred embodiments
  c-term may be amidated
KSMQVPFSXXXFSFXEQXXXXTVGWVERHRKMLR

SEQ ID NO: 1204 - protein, 34 aa, Artificial Sequence
  Description of Artificial Sequence: Synthetic peptide
  MOD_RES (16)..(16): Any L- or D-natural amino acid and any non-natural amino acid; see specification as filed for detailed description of substitutions, R-groups and preferred embodiments
  MOD_RES (18)..(21): Any L- or D-natural or non-natural amino acid, and this range may encompass 1 or 4 residues; see specification as filed for detailed description of substitutions, R-groups and preferred embodiments
  c-term may be amidated
KSMQVPFSRCCFSFAXQXXXXTVGWVERHRKMLR

SEQ ID NO: 1205 - protein, 34 aa, Artificial Sequence
  Description of Artificial Sequence: Synthetic peptide
  MOD_RES (10)..(11): Any L- or D-natural amino acid and any non-natural amino acid; see specification as filed for detailed description of substitutions, R-groups and preferred embodiments
  MOD_RES (16)..(16): Any L- or D-natural amino acid and any non-natural amino acid; see specification as filed for detailed description of substitutions, R-groups and preferred embodiments
  MOD_RES (18)..(21): Any L- or D-natural or non-natural amino acid, and this range may encompass 1 or 4 residues; see specification as filed for detailed description of substitutions, R-groups and preferred embodiments
  c-term may be amidated
KSMQVPFSRXXFSFAXQXXXXTVGWVERHRKMLR

SEQ ID NO: 1206 - protein, 34 aa, Artificial Sequence
  Description of Artificial Sequence: Synthetic peptide
  MOD_RES (1)..(1): Any L- or D-natural amino acid and any non-natural amino acid; see specification as filed for detailed description of substitutions, R-groups and preferred embodiments
  MOD_RES (10)..(11): Any L- or D-natural amino acid and any non-natural amino acid; see specification as filed for detailed description of substitutions, R-groups and preferred embodiments
  MOD_RES (16)..(16): Any L- or D-natural amino acid and any non-natural amino acid; see specification as filed for detailed description of substitutions, R-groups and preferred embodiments
  MOD_RES (18)..(21): Any L- or D-natural or non-natural amino acid, and this range may encompass 1 or 4 residues; see specification as filed for detailed description of substitutions, R-groups and preferred embodiments
  c-term may be amidated
XSMQVPFSRXXFSFAXQXXXXTVGWVERHRKMLR

SEQ ID NO: 1207 - protein, 34 aa, Artificial Sequence
  Description of Artificial Sequence: Synthetic peptide
  MOD_RES (2)..(2): Any L- or D-natural amino acid and any non-natural amino acid; see specification as filed for detailed description of substitutions, R-groups and preferred embodiments
  MOD_RES (10)..(11): Any L- or D-natural amino acid and any non-natural amino acid; see specification as filed for detailed description of substitutions, R-groups and preferred embodiments
  MOD_RES (16)..(16): Any L- or D-natural amino acid and any non-natural amino acid; see specification as filed for detailed description of substitutions, R-groups and preferred embodiments
  MOD_RES (18)..(21): Any L- or D-natural or non-natural amino acid, and this range may encompass 1 or 4 residues; see specification as filed for detailed description of substitutions, R-groups and preferred embodiments
  c-term may be amidated
KXMQVPFSRXXFSFAXQXXXXTVGWVERHRKMLR

SEQ ID NO: 1208 - protein, 34 aa, Artificial Sequence
  Description of Artificial Sequence: Synthetic peptide
  MOD_RES (3)..(3): Any L- or D-natural amino acid and any non-natural amino acid; see specification as filed for detailed description of substitutions, R-groups and preferred embodiments
  MOD_RES (10)..(11): Any L- or D-natural amino acid and any non-natural amino acid; see specification as filed for detailed description of substitutions, R-groups and preferred embodiments
  MOD_RES (16)..(16): Any L- or D-natural amino acid and any non-natural amino acid; see specification as filed for detailed description of substitutions, R-groups and preferred embodiments
  MOD_RES (18)..(21): Any L- or D-natural or non-natural amino acid, and this range may encompass 1 or 4 residues; see specification as filed for detailed description of substitutions, R-groups and preferred embodiments
  c-term may be amidated
KSXQVPFSRXXFSFAXQXXXXTVGWVERHRKMLR

SEQ ID NO: 1209 - protein, 34 aa, Artificial Sequence
  Description of Artificial Sequence: Synthetic peptide
  MOD_RES (4)..(4): Any L- or D-natural amino acid and any non-natural amino acid; see specification as filed for detailed description of substitutions, R-groups and preferred embodiments
  MOD_RES (10)..(11): Any L- or D-natural amino acid and any non-natural amino acid; see specification as filed for detailed description of substitutions, R-groups and preferred embodiments
  MOD_RES (16)..(16): Any L- or D-natural amino acid and any non-natural amino acid; see specification as filed for detailed description of substitutions, R-groups and preferred embodiments
  MOD_RES (18)..(21): Any L- or D-natural or non-natural amino acid, and this range may encompass 1 or 4 residues; see specification as filed for detailed description of substitutions, R-groups and preferred embodiments
  c-term may be amidated
KSMXVPFSRXXFSFAXQXXXXTVGWVERHRKMLR

SEQ ID NO: 1210 - protein, 34 aa, Artificial Sequence
  Description of Artificial Sequence: Synthetic peptide
  MOD_RES (17)..(17): Any L- or D-natural amino acid and any non-natural amino acid; see specification as filed for detailed description of substitutions, R-groups and preferred embodiments
  MOD_RES (18)..(21): Any L- or D-natural or non-natural amino acid, and this range may encompass 1 or 4 residues; see specification as filed for detailed description of substitutions, R-groups and preferred embodiments
  c-term may be amidated
KSMQVPFSRCCFSFAEXXXXXTVGWVERHRKMLR

SEQ ID NO: 1211 - protein, 34 aa, Artificial Sequence
  Description of Artificial Sequence: Synthetic peptide
  MOD_RES (10)..(11): Any L- or D-natural amino acid and any non-natural amino acid; see specification as filed for detailed description of substitutions, R-groups and preferred embodiments
  MOD_RES (17)..(17): Any L- or D-natural amino acid and any non-natural amino acid; see specification as filed for detailed description of substitutions, R-groups and preferred embodiments
  MOD_RES (18)..(21): Any L- or D-natural or non-natural amino acid, and this range may encompass 1 or 4 residues; see specification as filed for detailed description of substitutions, R-groups and preferred embodiments
  c-term may be amidated
KSMQVPFSRXXFSFAEXXXXXTVGWVERHRKMLR

SEQ ID NO: 1212 - protein, 34 aa, Artificial Sequence
  Description of Artificial Sequence: Synthetic peptide
  MOD_RES (1)..(1): Any L- or D-natural amino acid and any non-natural amino acid; see specification as filed for detailed description of substitutions, R-groups and preferred embodiments
  MOD_RES (10)..(11): Any L- or D-natural amino acid and any non-natural amino acid; see specification as filed for detailed description of substitutions, R-groups and preferred embodiments
  MOD_RES (17)..(17): Any L- or D-natural amino acid and any non-natural amino acid; see specification as filed for detailed description of substitutions, R-groups and preferred embodiments
  MOD_RES (18)..(21): Any L- or D-natural or non-natural amino acid, and this range may encompass 1 or 4 residues; see specification as filed for detailed description of substitutions, R-groups and preferred embodiments
  c-term may be amidated
XSMQVPFSRXXFSFAEXXXXXTVGWVERHRKMLR

SEQ ID NO: 1213 - protein, 34 aa, Artificial Sequence
  Description of Artificial Sequence: Synthetic peptide
  MOD_RES (2)..(2): Any L- or D-natural amino acid and any non-natural amino acid; see specification as filed for detailed description of substitutions, R-groups and preferred embodiments
  MOD_RES (10)..(11): Any L- or D-natural amino acid and any non-natural amino acid; see specification as filed for detailed description of substitutions, R-groups and preferred embodiments
  MOD_RES (17)..(17): Any L- or D-natural amino acid and any non-natural amino acid; see specification as filed for detailed description of substitutions, R-groups and preferred embodiments
  MOD_RES (18)..(21): Any L- or D-natural or non-natural amino acid, and this range may encompass 1 or 4 residues; see specification as filed for detailed description of substitutions, R-groups and preferred embodiments
  c-term may be amidated
KXMQVPFSRXXFSFAEXXXXXTVGWVERHRKMLR

SEQ ID NO: 1214 - protein, 34 aa, Artificial Sequence
  Description of Artificial Sequence: Synthetic peptide
  MOD_RES (3)..(3): Any L- or D-natural amino acid and any non-natural amino acid; see specification as filed for detailed description of substitutions, R-groups and preferred embodiments
  MOD_RES (10)..(11): Any L- or D-natural amino acid and any non-natural amino acid; see specification as filed for detailed description of substitutions, R-groups and preferred embodiments
  MOD_RES (17)..(17): Any L- or D-natural amino acid and any non-natural amino acid; see specification as filed for detailed description of substitutions, R-groups and preferred embodiments
  MOD_RES (18)..(21): Any L- or D-natural or non-natural amino acid, and this range may encompass 1 or 4 residues; see specification as filed for detailed description of substitutions, R-groups and preferred embodiments
  c-term may be amidated
KSXQVPFSRXXFSFAEXXXXXTVGWVERHRKMLR

SEQ ID NO: 1215 - protein, 34 aa, Artificial Sequence
  Description of Artificial Sequence: Synthetic peptide
  MOD_RES (4)..(4): Any L- or D-natural amino acid and any non-natural amino acid; see specification as filed for detailed description of substitutions, R-groups and preferred embodiments
  MOD_RES (10)..(11): Any L- or D-natural amino acid and any non-natural amino acid; see specification as filed for detailed description of substitutions, R-groups and preferred embodiments
  MOD_RES (17)..(17): Any L- or D-natural amino acid and any non-natural amino acid; see specification as filed for detailed description of substitutions, R-groups and preferred embodiments
  MOD_RES (18)..(21): Any L- or D-natural or non-natural amino acid, and this range may encompass 1 or 4 residues; see specification as filed for detailed description of substitutions, R-groups and preferred embodiments
  c-term may be amidated
KSMXVPFSRXXFSFAEXXXXXTVGWVERHRKMLR

SEQ ID NO: 1216 - protein, 34 aa, Artificial Sequence
  Description of Artificial Sequence: Synthetic peptide
  MOD_RES (5)..(5): Any L- or D-natural amino acid and any non-natural amino acid; see specification as filed for detailed description of substitutions, R-groups and preferred embodiments
  MOD_RES (10)..(11): Any L- or D-natural amino acid and any non-natural amino acid; see specification as filed for detailed description of substitutions, R-groups and preferred embodiments
  MOD_RES (17)..(17): Any L- or D-natural amino acid and any non-natural amino acid; see specification as filed for detailed description of substitutions, R-groups and preferred embodiments
  MOD_RES (18)..(21): Any L- or D-natural or non-natural amino acid, and this range may encompass 1 or 4 residues; see specification as filed for detailed description of substitutions, R-groups and preferred embodiments
  c-term may be amidated
KSMQXPFSRXXFSFAEXXXXXTVGWVERHRKMLR

SEQ ID NO: 1217 - protein, 34 aa, Artificial Sequence
  Description of Artificial Sequence: Synthetic peptide
  MOD_RES (6)..(6): Any L- or D-natural amino acid and any non-natural amino acid; see specification as filed for detailed description of substitutions, R-groups and preferred embodiments
  MOD_RES (10)..(11): Any L- or D-natural amino acid and any non-natural amino acid; see specification as filed for detailed description of substitutions, R-groups and preferred embodiments
  MOD_RES (17)..(17): Any L- or D-natural amino acid and any non-natural amino acid; see specification as filed for detailed description of substitutions, R-groups and preferred embodiments
  MOD_RES (18)..(21): Any L- or D-natural or non-natural amino acid, and this range may encompass 1 or 4 residues; see specification as filed for detailed description of substitutions, R-groups and preferred embodiments
  c-term may be amidated
KSMQVXFSRXXFSFAEXXXXXTVGWVERHRKMLR

SEQ ID NO: 1218 - protein, 34 aa, Artificial Sequence
  Description of Artificial Sequence: Synthetic peptide
  MOD_RES (7)..(7): Any L- or D-natural amino acid and any non-natural amino acid; see specification as filed for detailed description of substitutions, R-groups and preferred embodiments
  MOD_RES (10)..(11): Any L- or D-natural amino acid and any non-natural amino acid; see specification as filed for detailed description of substitutions, R-groups and preferred embodiments
  MOD_RES (17)..(17): Any L- or D-natural amino acid and any non-natural amino acid; see specification as filed for detailed description of substitutions, R-groups and preferred embodiments
  MOD_RES (18)..(21): Any L- or D-natural or non-natural amino acid, and this range may encompass 1 or 4 residues; see specification as filed for detailed description of substitutions, R-groups and preferred embodiments
  c-term may be amidated
KSMQVPXSRXXFSFAEXXXXXTVGWVERHRKMLR

SEQ ID NO: 1219 - protein, 34 aa, Artificial Sequence
  Description of Artificial Sequence: Synthetic peptide
  MOD_RES (8)..(8): Any L- or D-natural amino acid and any non-natural amino acid; see specification as filed for detailed description of substitutions, R-groups and preferred embodiments
  MOD_RES (10)..(11): Any L- or D-natural amino acid and any non-natural amino acid; see specification as filed for detailed description of substitutions, R-groups and preferred embodiments
  MOD_RES (17)..(17): Any L- or D-natural amino acid and any non-natural amino acid; see specification as filed for detailed description of substitutions, R-groups and preferred embodiments
  MOD_RES (18)..(21): Any L- or D-natural or non-natural amino acid, and this range may encompass 1 or 4 residues; see specification as filed for detailed description of substitutions, R-groups and preferred embodiments
  c-term may be amidated
KSMQVPFXRXXFSFAEXXXXXTVGWVERHRKMLR

SEQ ID NO: 1220 - protein, 34 aa, Artificial Sequence
  Description of Artificial Sequence: Synthetic peptide
  MOD_RES (9)..(11): Any L- or D-natural amino acid and any non-natural amino acid; see specification as filed for detailed description of substitutions, R-groups and preferred embodiments
  MOD_RES (17)..(17): Any L- or D-natural amino acid and any non-natural amino acid; see specification as filed for detailed description of substitutions, R-groups and preferred embodiments
  MOD_RES (18)..(21): Any L- or D-natural or non-natural amino acid, and this range may encompass 1 or 4 residues; see specification as filed for detailed description of substitutions, R-groups and preferred embodiments
  c-term may be amidated
KSMQVPFSXXXFSFAEXXXXXTVGWVERHRKMLR

SEQ ID NO: 1221 - protein, 24 aa, Artificial Sequence
  Description of Artificial Sequence: Synthetic peptide
  c-term may be amidated
AYRNTSSICSNEGLIFKLKRGKEA

SEQ ID NO: 1222 - protein, 24 aa, Artificial Sequence
  Description of Artificial Sequence: Synthetic peptide
  c-term may be amidated
AYRNTSSICSNEGLIFKLKRGKEA

SEQ ID NO: 1223 - protein, 24 aa, Artificial Sequence
  Description of Artificial Sequence: Synthetic peptide
  c-term may be amidated
AYRNTSSICSNEGLIFKLKRGKEA

SEQ ID NO: 1224 - protein, 25 aa, Artificial Sequence
  Description of Artificial Sequence: Synthetic peptide
  c-term may be amidated
KSMQVPFSRCCFSFAEQEIPLRAIL

SEQ ID NO: 1225 - protein, 25 aa, Artificial Sequence
  Description of Artificial Sequence: Synthetic peptide
  MOD_RES (10)..(11): Any L- or D-natural amino acid and any non-natural amino acid; see specification as filed for detailed description of substitutions, R-groups and preferred embodiments
  c-term may be amidated
KSMQVPFSRXXFSFAEQEIPLRAIL

SEQ ID NO: 1226 - protein, 25 aa, Artificial Sequence
  Description of Artificial Sequence: Synthetic peptide
  c-term may be amidated
KSMQVPFSRCCFSFAEQEIPLRAIL

SEQ ID NO: 1227 - protein, 25 aa, Artificial Sequence
  Description of Artificial Sequence: Synthetic peptide
  MOD_RES (10)..(11): Any L- or D-natural amino acid and any non-natural amino acid; see specification as filed for detailed description of substitutions, R-groups and preferred embodiments
  c-term may be amidated
KSMQVPFSRXXFSFAEQEIPLRAIL

SEQ ID NO: 1228 - protein, 34 aa, Artificial Sequence; identical to SEQ ID NO: 987
  Description of Artificial Sequence: Synthetic peptide
  c-term may be amidated

SEQ ID NO: 1229 - protein, 33 aa, Artificial Sequence
  Description of Artificial Sequence: Synthetic peptide
  c-term may be amidated
ASNEGLIFKLKRGKEACALDTVGWVQRHRKMLR

SEQ ID NO: 1230 - protein, 33 aa, Artificial Sequence; identical to SEQ ID NO: 1229
  Description of Artificial Sequence: Synthetic peptide
  c-term may be amidated

SEQ ID NO: 1231 - protein, 33 aa, Artificial Sequence; identical to SEQ ID NO: 1229
  Description of Artificial Sequence: Synthetic peptide
  c-term may be amidated

SEQ ID NO: 1232 - protein, 33 aa, Artificial Sequence; identical to SEQ ID NO: 1229
  Description of Artificial Sequence: Synthetic peptide
  c-term may be amidated

SEQ ID NO: 1233 - protein, 33 aa, Artificial Sequence; identical to SEQ ID NO: 1229
  Description of Artificial Sequence: Synthetic peptide
  c-term may be amidated

SEQ ID NO: 1234 - protein, 33 aa, Artificial Sequence; identical to SEQ ID NO: 1229
  Description of Artificial Sequence: Synthetic peptide
  c-term may be amidated

SEQ ID NO: 1235 - protein, 31 aa, Artificial Sequence; identical to SEQ ID NO: 1105
  Description of Artificial Sequence: Synthetic peptide
  MOD_RES (15)..(18): Any L- or D-natural or non-natural amino acid, and this range may encompass 1 or 4 residues; see specification as filed for detailed description of substitutions, R-groups and preferred embodiments
  c-term may be amidated

SEQ ID NO: 1236 - protein, 31 aa, Artificial Sequence; identical to SEQ ID NO: 1106
  Description of Artificial Sequence: Synthetic peptide
  MOD_RES (10)..(11): Any L- or D-natural amino acid and any non-natural amino acid; see specification as filed for detailed description of substitutions, R-groups and preferred embodiments
  MOD_RES (15)..(18): Any L- or D-natural or non-natural amino acid, and this range may encompass 1 or 4 residues; see specification as filed for detailed description of substitutions, R-groups and preferred embodiments
  c-term may be amidated

SEQ ID NO: 1237 - protein, 31 aa, Artificial Sequence; identical to SEQ ID NO: 1107
  Description of Artificial Sequence: Synthetic peptide
  MOD_RES (1)..(1): Any L- or D-natural amino acid and any non-natural amino acid; see specification as filed for detailed description of substitutions, R-groups and preferred embodiments
  MOD_RES (10)..(11): Any L- or D-natural amino acid and any non-natural amino acid; see specification as filed for detailed description of substitutions, R-groups and preferred embodiments
  MOD_RES (15)..(18): Any L- or D-natural or non-natural amino acid, and this range may encompass 1 or 4 residues; see specification as filed for detailed description of substitutions, R-groups and preferred embodiments
  c-term may be amidated

SEQ ID NO: 1238 - protein, 31 aa, Artificial Sequence; identical to SEQ ID NO: 1108
  Description of Artificial Sequence: Synthetic peptide
  MOD_RES (2)..(2): Any L- or D-natural amino acid and any non-natural amino acid; see specification as filed for detailed description of substitutions, R-groups and preferred embodiments
  MOD_RES (10)..(11): Any L- or D-natural amino acid and any non-natural amino acid; see specification as filed for detailed description of substitutions, R-groups and preferred embodiments
  MOD_RES (15)..(18): Any L- or D-natural or non-natural amino acid, and this range may encompass 1 or 4 residues; see specification as filed for detailed description of substitutions, R-groups and preferred embodiments
  c-term may be amidated

SEQ ID NO: 1239 - protein, 31 aa, Artificial Sequence; identical to SEQ ID NO: 1109
  Description of Artificial Sequence: Synthetic peptide
  MOD_RES (3)..(3): Any L- or D-natural amino acid and any non-natural amino acid; see specification as filed for detailed description of substitutions, R-groups and preferred embodiments
  MOD_RES (10)..(11): Any L- or D-natural amino acid and any non-natural amino acid; see specification as filed for detailed description of substitutions, R-groups and preferred embodiments
  MOD_RES (15)..(18): Any L- or D-natural or non-natural amino acid, and this range may encompass 1 or 4 residues; see specification as filed for detailed description of substitutions, R-groups and preferred embodiments
  c-term may be amidated

SEQ ID NO: 1240 - protein, 31 aa, Artificial Sequence; identical to SEQ ID NO: 1110
  Description of Artificial Sequence: Synthetic peptide
  MOD_RES (4)..(4): Any L- or D-natural amino acid and any non-natural amino acid; see specification as filed for detailed description of substitutions, R-groups and preferred embodiments
  MOD_RES (10)..(11): Any L- or D-natural amino acid and any non-natural amino acid; see specification as filed for detailed description of substitutions, R-groups and preferred embodiments
  MOD_RES (15)..(18): Any L- or D-natural or non-natural amino acid, and this range may encompass 1 or 4 residues; see specification as filed for detailed description of substitutions, R-groups and preferred embodiments
  c-term may be amidated

SEQ ID NO: 1241 - protein, 31 aa, Artificial Sequence; identical to SEQ ID NO: 1111
  Description of Artificial Sequence: Synthetic peptide
  MOD_RES (5)..(5): Any L- or D-natural amino acid and any non-natural amino acid; see specification as filed for detailed description of substitutions, R-groups and preferred embodiments
  MOD_RES (10)..(11): Any L- or D-natural amino acid and any non-natural amino acid; see specification as filed for detailed description of substitutions, R-groups and preferred embodiments
  MOD_RES (15)..(18): Any L- or D-natural or non-natural amino acid, and this range may encompass 1 or 4 residues; see specification as filed for detailed description of substitutions, R-groups and preferred embodiments
  c-term may be amidated

SEQ ID NO: 1242 - protein, 31 aa, Artificial Sequence; identical to SEQ ID NO: 1112
  Description of Artificial Sequence: Synthetic peptide
  MOD_RES (6)..(6): Any L- or D-natural amino acid and any non-natural amino acid; see specification as filed for detailed description of substitutions, R-groups and preferred embodiments
  MOD_RES (10)..(11): Any L- or D-natural amino acid and any non-natural amino acid; see specification as filed for detailed description of substitutions, R-groups and preferred embodiments
  MOD_RES (15)..(18): Any L- or D-natural or non-natural amino acid, and this range may encompass 1 or 4 residues; see specification as filed for detailed description of substitutions, R-groups and preferred embodiments
  c-term may be amidated

SEQ ID NO: 1243 - protein, 31 aa, Artificial Sequence; identical to SEQ ID NO: 1113
  Description of Artificial Sequence: Synthetic peptide
  MOD_RES (7)..(7): Any L- or D-natural amino acid and any non-natural amino acid; see specification as filed for detailed description of substitutions, R-groups and preferred embodiments
  MOD_RES (10)..(11): Any L- or D-natural amino acid and any non-natural amino acid; see specification as filed for detailed description of substitutions, R-groups and preferred embodiments
  MOD_RES (15)..(18): Any L- or D-natural or non-natural amino acid, and this range may encompass 1 or 4 residues; see specification as filed for detailed description of substitutions, R-groups and preferred embodiments
  c-term may be amidated

SEQ ID NO: 1244 - protein, 31 aa, Artificial Sequence; identical to SEQ ID NO: 1114
  Description of Artificial Sequence: Synthetic peptide
  MOD_RES (8)..(8): Any L- or D-natural amino acid and any non-natural amino acid; see specification as filed for detailed description of substitutions, R-groups and preferred embodiments
  MOD_RES (10)..(11): Any L- or D-natural amino acid and any non-natural amino acid; see specification as filed for detailed description of substitutions, R-groups and preferred embodiments
  MOD_RES (15)..(18): Any L- or D-natural or non-natural amino acid, and this range may encompass 1 or 4 residues; see specification as filed for detailed description of substitutions, R-groups and preferred embodiments
  c-term may be amidated

SEQ ID NO: 1245 - protein, 31 aa, Artificial Sequence; identical to SEQ ID NO: 1115
  Description of Artificial Sequence: Synthetic peptide
  MOD_RES (9)..(11): Any L- or D-natural amino acid and any non-natural amino acid; see specification as filed for detailed description of substitutions, R-groups and preferred embodiments
  MOD_RES (15)..(18): Any L- or D-natural or non-natural amino acid, and this range may encompass 1 or 4 residues; see specification as filed for detailed description of substitutions, R-groups and preferred embodiments
  c-term may be amidated

SEQ ID NO: 1246 - protein, 31 aa, Artificial Sequence; identical to SEQ ID NO: 1116
  Description of Artificial Sequence: Synthetic peptide
  MOD_RES (12)..(12): Any L- or D-natural amino acid and any non-natural amino acid; see specification as filed for detailed description of substitutions, R-groups and preferred embodiments
  MOD_RES (15)..(18): Any L- or D-natural or non-natural amino acid, and this range may encompass 1 or 4 residues; see specification as filed for detailed description of substitutions, R-groups and preferred embodiments
  c-term may be amidated

SEQ ID NO: 1247 - protein, 31 aa, Artificial Sequence; identical to SEQ ID NO: 1117
  Description of Artificial Sequence: Synthetic peptide
  MOD_RES (10)..(12): Any L- or D-natural amino acid and any non-natural amino acid; see specification as filed for detailed description of substitutions, R-groups and preferred embodiments
  MOD_RES (15)..(18): Any L- or D-natural or non-natural amino acid, and this range may encompass 1 or 4 residues; see specification as filed for detailed description of substitutions, R-groups and preferred embodiments
  c-term may be amidated

SEQ ID NO: 1248 - protein, 31 aa, Artificial Sequence; identical to SEQ ID NO: 1118
  Description of Artificial Sequence: Synthetic peptide
  MOD_RES (1)..(1): Any L- or D-natural amino acid and any non-natural amino acid; see specification as filed for detailed description of substitutions, R-groups and preferred embodiments
  MOD_RES (10)..(12): Any L- or D-natural amino acid and any non-natural amino acid; see specification as filed for detailed description of substitutions, R-groups and preferred embodiments
  MOD_RES (15)..(18): Any L- or D-natural or non-natural amino acid, and this range may encompass 1 or 4 residues; see specification as filed for detailed description of substitutions, R-groups and preferred embodiments
  c-term may be amidated

SEQ ID NO: 1249 - protein, 31 aa, Artificial Sequence; identical to SEQ ID NO: 1119
  Description of Artificial Sequence: Synthetic peptide
  MOD_RES (2)..(2): Any L- or D-natural amino acid and any non-natural amino acid; see specification as filed for detailed description of substitutions, R-groups and preferred embodiments
  MOD_RES (10)..(12): Any L- or D-natural amino acid and any non-natural amino acid; see specification as filed for detailed description of substitutions, R-groups and preferred embodiments
  MOD_RES (15)..(18): Any L- or D-natural or non-natural amino acid, and this range may encompass 1 or 4 residues; see specification as filed for detailed description of substitutions, R-groups and preferred embodiments
  c-term may be amidated

SEQ ID NO: 1250 - protein, 31 aa, Artificial Sequence; identical to SEQ ID NO: 1120
  Description of Artificial Sequence: Synthetic peptide
  MOD_RES (3)..(3): Any L- or D-natural amino acid and any non-natural amino acid; see specification as filed for detailed description of substitutions, R-groups and preferred embodiments
  MOD_RES (10)..(12): Any L- or D-natural amino acid and any non-natural amino acid; see specification as filed for detailed description of substitutions, R-groups and preferred embodiments
  MOD_RES (15)..(18): Any L- or D-natural or non-natural amino acid, and this range may encompass 1 or 4 residues; see specification as filed for detailed description of substitutions, R-groups and preferred embodiments
  c-term may be amidated

SEQ ID NO: 1251 - protein, 31 aa, Artificial Sequence; identical to SEQ ID NO: 1121
  Description of Artificial Sequence: Synthetic peptide
  MOD_RES (4)..(4): Any L- or D-natural amino acid and any non-natural amino acid; see specification as filed for detailed description of substitutions, R-groups and preferred embodiments
  MOD_RES (10)..(12): Any L- or D-natural amino acid and any non-natural amino acid; see specification as filed for detailed description of substitutions, R-groups and preferred embodiments
  MOD_RES (15)..(18): Any L- or D-natural or non-natural amino acid, and this range may encompass 1 or 4 residues; see specification as filed for detailed description of substitutions, R-groups and preferred embodiments
  c-term may be amidated

SEQ ID NO: 1252 - protein, 31 aa, Artificial Sequence; identical to SEQ ID NO: 1122
  Description of Artificial Sequence: Synthetic peptide
  MOD_RES (5)..(5): Any L- or D-natural amino acid and any non-natural amino acid; see specification as filed for detailed description of substitutions, R-groups and preferred embodiments
  MOD_RES (10)..(12): Any L- or D-natural amino acid and any non-natural amino acid; see specification as filed for detailed description of substitutions, R-groups and preferred embodiments
  MOD_RES (15)..(18): Any L- or D-natural or non-natural amino acid, and this range may encompass 1 or 4 residues; see specification as filed for detailed description of substitutions, R-groups and preferred embodiments
  c-term may be amidated

SEQ ID NO: 1253 - protein, 31 aa, Artificial Sequence; identical to SEQ ID NO: 1123
  Description of Artificial Sequence: Synthetic peptide
  MOD_RES (6)..(6): Any L- or D-natural amino acid and any non-natural amino acid; see specification as filed for detailed description of substitutions, R-groups and preferred embodiments
  MOD_RES (10)..(12): Any L- or D-natural amino acid and any non-natural amino acid; see specification as filed for detailed description of substitutions, R-groups and preferred embodiments
  MOD_RES (15)..(18): Any L- or D-natural or non-natural amino acid, and this range may encompass 1 or 4 residues; see specification as filed for detailed description of substitutions, R-groups and preferred embodiments
  c-term may be amidated

SEQ ID NO: 1254 - protein, 31 aa, Artificial Sequence; identical to SEQ ID NO: 1124
  Description of Artificial Sequence: Synthetic peptide
  MOD_RES (7)..(7): Any L- or D-natural amino acid and any non-natural amino acid; see specification as filed for detailed description of substitutions, R-groups and preferred embodiments
  MOD_RES (10)..(12): Any L- or D-natural amino acid and any non-natural amino acid; see specification as filed for detailed description of substitutions, R-groups and preferred embodiments
  MOD_RES (15)..(18): Any L- or D-natural or non-natural amino acid, and this range may encompass 1 or 4 residues; see specification as filed for detailed description of substitutions, R-groups and preferred embodiments
  c-term may be amidated

SEQ ID NO: 1255 - protein, 31 aa, Artificial Sequence; identical to SEQ ID NO: 1125
  Description of Artificial Sequence: Synthetic peptide
  MOD_RES (8)..(8): Any L- or D-natural amino acid and any non-natural amino acid; see specification as filed for detailed description of substitutions, R-groups and preferred embodiments
  MOD_RES (10)..(12): Any L- or D-natural amino acid and any non-natural amino acid; see specification as filed for detailed description of substitutions, R-groups and preferred embodiments
  MOD_RES (15)..(18): Any L- or D-natural or non-natural amino acid, and this range may encompass 1 or 4 residues; see specification as filed for detailed description of substitutions, R-groups and preferred embodiments
  c-term may be amidated

SEQ ID NO: 1256 - protein, 31 aa, Artificial Sequence; identical to SEQ ID NO: 1126
  Description of Artificial Sequence: Synthetic peptide
  MOD_RES (9)..(12): Any L- or D-natural amino acid and any non-natural amino acid; see specification as filed for detailed description of substitutions, R-groups and preferred embodiments
  MOD_RES (15)..(18): Any L- or D-natural or non-natural amino acid, and this range may encompass 1 or 4 residues; see specification as filed for detailed description of substitutions, R-groups and preferred embodiments
  c-term may be amidated

SEQ ID NO: 1257 - protein, 31 aa, Artificial Sequence; identical to SEQ ID NO: 1127
  Description of Artificial Sequence: Synthetic peptide
  MOD_RES (13)..(13): Any L- or D-natural amino acid and any non-natural amino acid; see specification as filed for detailed description of substitutions, R-groups and preferred embodiments
  MOD_RES (15)..(18): Any L- or D-natural or non-natural amino acid, and this range may encompass 1 or 4 residues; see specification as filed for detailed description of substitutions, R-groups and preferred embodiments
  c-term may be amidated

SEQ ID NO: 1258 - protein, 31 aa, Artificial Sequence; identical to SEQ ID NO: 1128
  Description of Artificial Sequence: Synthetic peptide
  MOD_RES (10)..(11): Any L- or D-natural amino acid and any non-natural amino acid; see specification as filed for detailed description of substitutions, R-groups and preferred embodiments
  MOD_RES (13)..(13): Any L- or D-natural amino acid and any non-natural amino acid; see specification as filed for detailed description of substitutions, R-groups and preferred embodiments
  MOD_RES (15)..(18): Any L- or D-natural or non-natural amino acid, and this range may encompass 1 or 4 residues; see specification as filed for detailed description of substitutions, R-groups and preferred embodiments
  c-term may be amidated

SEQ ID NO: 1259 - protein, 31 aa, Artificial Sequence; identical to SEQ ID NO: 1129
  Description of Artificial Sequence: Synthetic peptide
  MOD_RES (1)..(1): Any L- or D-natural amino acid and any non-natural amino acid; see specification as filed for detailed description of substitutions, R-groups and preferred embodiments
  MOD_RES (10)..(11): Any L- or D-natural amino acid and any non-natural amino acid; see specification as filed for detailed description of substitutions, R-groups and preferred embodiments
  MOD_RES (13)..(13): Any L- or D-natural amino acid and any non-natural amino acid; see specification as filed for detailed description of substitutions, R-groups and preferred embodiments
  MOD_RES (15)..(18): Any L- or D-natural or non-natural amino acid, and this range may encompass 1 or 4 residues; see specification as filed for detailed description of substitutions, R-groups and preferred embodiments
  c-term may be amidated

SEQ ID NO: 1260 - protein, 31 aa, Artificial Sequence; identical to SEQ ID NO: 1130
  Description of Artificial Sequence: Synthetic peptide
  MOD_RES (2)..(2): Any L- or D-natural amino acid and any non-natural amino acid; see specification as filed for detailed description of substitutions, R-groups and preferred embodiments
  MOD_RES (10)..(11): Any L- or D-natural amino acid and any non-natural amino acid; see specification as filed for detailed description of substitutions, R-groups and preferred embodiments
  MOD_RES (13)..(13): Any L- or D-natural amino acid and any non-natural amino acid; see specification as filed for detailed description of substitutions, R-groups and preferred embodiments
  MOD_RES (15)..(18): Any L- or D-natural or non-natural amino acid, and this range may encompass 1 or 4 residues; see specification as filed for detailed description of substitutions, R-groups and preferred embodiments
  c-term may be amidated

SEQ ID NO: 1261 - protein, 31 aa, Artificial Sequence; identical to SEQ ID NO: 1131
  Description of Artificial Sequence: Synthetic peptide
  MOD_RES (3)..(3): Any L- or D-natural amino acid and any non-natural amino acid; see specification as filed for detailed description of substitutions, R-groups and preferred embodiments
  MOD_RES (10)..(11): Any L- or D-natural amino acid and any non-natural amino acid; see specification as filed for detailed description of substitutions, R-groups and preferred embodiments
  MOD_RES (13)..(13): Any L- or D-natural amino acid and any non-natural amino acid; see specification as filed for detailed description of substitutions, R-groups and preferred embodiments
  MOD_RES (15)..(18): Any L- or D-natural or non-natural amino acid, and this range may encompass 1 or 4 residues; see specification as filed for detailed description of substitutions, R-groups and preferred embodiments
  c-term may be amidated

SEQ ID NO: 1262 - protein, 31 aa, Artificial Sequence; identical to SEQ ID NO: 1132
  Description of Artificial Sequence: Synthetic peptide
  MOD_RES (4)..(4): Any L- or D-natural amino acid and any non-natural amino acid; see specification as filed for detailed description of substitutions, R-groups and preferred embodiments
  MOD_RES (10)..(11): Any L- or D-natural amino acid and any non-natural amino acid; see specification as filed for detailed description of substitutions, R-groups and preferred embodiments
  MOD_RES (13)..(13): Any L- or D-natural amino acid and any non-natural amino acid; see specification as filed for detailed description of substitutions, R-groups and preferred embodiments
  MOD_RES (15)..(18): Any L- or D-natural or non-natural amino acid, and this range may encompass 1 or 4 residues; see specification as filed for detailed description of substitutions, R-groups and preferred embodiments
  c-term may be amidated

SEQ ID NO: 1263 - protein, 31 aa, Artificial Sequence; identical to SEQ ID NO: 1133
  Description of Artificial Sequence: Synthetic peptide
  MOD_RES (5)..(5): Any L- or D-natural amino acid and any non-natural amino acid; see specification as filed for detailed description of substitutions, R-groups and preferred embodiments
  MOD_RES (10)..(11): Any L- or D-natural amino acid and any non-natural amino acid; see specification as filed for detailed description of substitutions, R-groups and preferred embodiments
  MOD_RES (13)..(13): Any L- or D-natural amino acid and any non-natural amino acid; see specification as filed for detailed description of substitutions, R-groups and preferred embodiments
  MOD_RES (15)..(18): Any L- or D-natural or non-natural amino acid, and this range may encompass 1 or 4 residues; see specification as filed for detailed description of substitutions, R-groups and preferred embodiments
  c-term may be amidated

SEQ ID NO: 1264 - protein, 31 aa, Artificial Sequence; identical to SEQ ID NO: 1134
  Description of Artificial Sequence: Synthetic peptide
  MOD_RES (6)..(6): Any L- or D-natural amino acid and any non-natural amino acid; see specification as filed for detailed description of substitutions, R-groups and preferred embodiments
  MOD_RES (10)..(11): Any L- or D-natural amino acid and any non-natural amino acid; see specification as filed for detailed description of substitutions, R-groups and preferred embodiments
  MOD_RES (13)..(13): Any L- or D-natural amino acid and any non-natural amino acid; see specification as filed for detailed description of substitutions, R-groups and preferred embodiments
  MOD_RES (15)..(18): Any L- or D-natural or non-natural amino acid, and this range may encompass 1 or 4 residues; see specification as filed for detailed description of substitutions, R-groups and preferred embodiments
  c-term may be amidated

SEQ ID NO: 1265 - protein, 31 aa, Artificial Sequence; identical to SEQ ID NO: 1135
  Description of Artificial Sequence: Synthetic peptide
  MOD_RES (7)..(7): Any L- or D-natural amino acid and any non-natural amino acid; see specification as filed for detailed description of substitutions, R-groups and preferred embodiments
  MOD_RES (10)..(11): Any L- or D-natural amino acid and any non-natural amino acid; see specification as filed for detailed description of substitutions, R-groups and preferred embodiments
  MOD_RES (13)..(13): Any L- or D-natural amino acid and any non-natural amino acid; see specification as filed for detailed description of substitutions, R-groups and preferred embodiments
  MOD_RES (15)..(18): Any L- or D-natural or non-natural amino acid, and this range may encompass 1 or 4 residues; see specification as filed for detailed description of substitutions, R-groups and preferred embodiments
  c-term may be amidated

SEQ ID NO: 1266 - protein, 31 aa, Artificial Sequence; identical to SEQ ID NO: 1136
  Description of Artificial Sequence: Synthetic peptide
  MOD_RES (8)..(8): Any L- or D-natural amino acid and any non-natural amino acid; see specification as filed for detailed description of substitutions, R-groups and preferred embodiments
  MOD_RES (10)..(11): Any L- or D-natural amino acid and any non-natural amino acid; see specification as filed for detailed description of substitutions, R-groups and preferred embodiments
  MOD_RES (13)..(13): Any L- or D-natural amino acid and any non-natural amino acid; see specification as filed for detailed description of substitutions, R-groups and preferred embodiments
  MOD_RES (15)..(18): Any L- or D-natural or non-natural amino acid, and this range may encompass 1 or 4 residues; see specification as filed for detailed description of substitutions, R-groups and preferred embodiments
  c-term may be amidated

SEQ ID NO: 1267 - protein, 31 aa, Artificial Sequence; identical to SEQ ID NO: 1137
  Description of Artificial Sequence: Synthetic peptide
  MOD_RES (9)..(11): Any L- or D-natural amino acid and any non-natural amino acid; see specification as filed for detailed description of substitutions, R-groups and preferred embodiments
  MOD_RES (13)..(13): Any L- or D-natural amino acid and any non-natural amino acid; see specification as filed for detailed description of substitutions, R-groups and preferred embodiments
  MOD_RES (15)..(18): Any L- or D-natural or non-natural amino acid, and this range may encompass 1 or 4 residues; see specification as filed for detailed description of substitutions, R-groups and preferred embodiments
  c-term may be amidated

SEQ ID NO: 1268 - protein, 31 aa, Artificial Sequence; identical to SEQ ID NO: 1138
  Description of Artificial Sequence: Synthetic peptide
  MOD_RES (14)..(14): Any L- or D-natural amino acid and any non-natural amino acid; see specification as filed for detailed description of substitutions, R-groups and preferred embodiments
  MOD_RES (15)..(18): Any L- or D-natural or non-natural amino acid, and this range may encompass 1 or 4 residues; see specification as filed for detailed description of substitutions, R-groups and preferred embodiments
  c-term may be amidated

SEQ ID NO: 1269 - protein, 31 aa, Artificial Sequence; identical to SEQ ID NO: 1139
  Description of Artificial Sequence: Synthetic peptide
  MOD_RES (10)..(11): Any L- or D-natural amino acid and any non-natural amino acid; see specification as filed for detailed description of substitutions, R-groups and preferred embodiments
  MOD_RES (14)..(14): Any L- or D-natural amino acid and any non-natural amino acid; see specification as filed for detailed description of substitutions, R-groups and preferred embodiments
  MOD_RES (15)..(18): Any L- or D-natural or non-natural amino acid, and this range may encompass 1 or 4 residues; see specification as filed for detailed description of substitutions, R-groups and preferred embodiments
  c-term may be amidated

SEQ ID NO: 1270 - protein, 31 aa, Artificial Sequence; identical to SEQ ID NO: 1140
  Description of Artificial Sequence: Synthetic peptide
  MOD_RES (1)..(1): Any L- or D-natural amino acid and any non-natural amino acid; see specification as filed for detailed description of substitutions, R-groups and preferred embodiments
  MOD_RES (10)..(11): Any L- or D-natural amino acid and any non-natural amino acid; see specification as filed for detailed description of substitutions, R-groups and preferred embodiments
  MOD_RES (14)..(14): Any L- or D-natural amino acid and any non-natural amino acid; see specification as filed for detailed description of substitutions, R-groups and preferred embodiments
  MOD_RES (15)..(18): Any L- or D-natural or non-natural amino acid, and this range may encompass 1 or 4 residues; see specification as filed for detailed description of substitutions, R-groups and preferred embodiments
  c-term may be amidated

SEQ ID NO: 1271 - protein, 31 aa, Artificial Sequence; identical to SEQ ID NO: 1141
  Description of Artificial Sequence: Synthetic peptide
  MOD_RES (2)..(2): Any L- or D-natural amino acid and any non-natural amino acid; see specification as filed for detailed description of substitutions, R-groups and preferred embodiments
  MOD_RES (10)..(11): Any L- or D-natural amino acid and any non-natural amino acid; see specification as filed for detailed description of substitutions, R-groups and preferred embodiments
  MOD_RES (14)..(14): Any L- or D-natural amino acid and any non-natural amino acid; see specification as filed for detailed description of substitutions, R-groups and preferred embodiments
  MOD_RES (15)..(18): Any L- or D-natural or non-natural amino acid, and this range may encompass 1 or 4 residues; see specification as filed for detailed description of substitutions, R-groups and preferred embodiments
  c-term may be amidated

SEQ ID NO: 1272 - protein, 31 aa, Artificial Sequence; identical to SEQ ID NO: 1142
  Description of Artificial Sequence: Synthetic peptide
  MOD_RES (3)..(3): Any L- or D-natural amino acid and any non-natural amino acid; see specification as filed for detailed description of substitutions, R-groups and preferred embodiments
  MOD_RES (10)..(11): Any L- or D-natural amino acid and any non-natural amino acid; see specification as filed for detailed description of substitutions, R-groups and preferred embodiments
  MOD_RES (14)..(14): Any L- or D-natural amino acid and any non-natural amino acid; see specification as filed for detailed description of substitutions, R-groups and preferred embodiments
  MOD_RES (15)..(18): Any L- or D-natural or non-natural amino acid, and this range may encompass 1 or 4 residues; see specification as filed for detailed description of substitutions, R-groups and preferred embodiments
  c-term may be amidated

SEQ ID NO: 1273 - protein, 31 aa, Artificial Sequence; identical to SEQ ID NO: 1143
  Description of Artificial Sequence: Synthetic peptide
  MOD_RES (4)..(4): Any L- or D-natural amino acid and any non-natural amino acid; see specification as filed for detailed description of substitutions, R-groups and preferred embodiments
  MOD_RES (10)..(11): Any L- or D-natural amino acid and any non-natural amino acid; see specification as filed for detailed description of substitutions, R-groups and preferred embodiments
  MOD_RES (14)..(14): Any L- or D-natural amino acid and any non-natural amino acid; see specification as filed for detailed description of substitutions, R-groups and preferred embodiments
  MOD_RES (15)..(18): Any L- or D-natural or non-natural amino acid, and this range may encompass 1 or 4 residues; see specification as filed for detailed description of substitutions, R-groups and preferred embodiments
  c-term may be amidated

SEQ ID NO: 1274 - protein, 31 aa, Artificial Sequence; identical to SEQ ID NO: 1144
  Description of Artificial Sequence: Synthetic peptide
  MOD_RES (5)..(5): Any L- or D-natural amino acid and any non-natural amino acid; see specification as filed for detailed description of substitutions, R-groups and preferred embodiments
  MOD_RES (10)..(11): Any L- or D-natural amino acid and any non-natural amino acid; see specification as filed for detailed description of substitutions, R-groups and preferred embodiments
  MOD_RES (14)..(14): Any L- or D-natural amino acid and any non-natural amino acid; see specification as filed for detailed description of substitutions, R-groups and preferred embodiments
  MOD_RES (15)..(18): Any L- or D-natural or non-natural amino acid, and this range may encompass 1 or 4 residues; see specification as filed for detailed description of substitutions, R-groups and preferred embodiments
  c-term may be amidated

SEQ ID NO: 1275 - protein, 31 aa, Artificial Sequence; identical to SEQ ID NO: 1145
  Description of Artificial Sequence: Synthetic peptide
  MOD_RES (6)..(6): Any L- or D-natural amino acid and any non-natural amino acid; see specification as filed for detailed description of substitutions, R-groups and preferred embodiments
  MOD_RES (10)..(11): Any L- or D-natural amino acid and any non-natural amino acid; see specification as filed for detailed description of substitutions, R-groups and preferred embodiments
  MOD_RES (14)..(14): Any L- or D-natural amino acid and any non-natural amino acid; see specification as filed for detailed description of substitutions, R-groups and preferred embodiments
  MOD_RES (15)..(18): Any L- or D-natural or non-natural amino acid, and this range may encompass 1 or 4 residues; see specification as filed for detailed description of substitutions, R-groups and preferred embodiments
  c-term may be amidated

SEQ ID NO: 1276 - protein, 31 aa, Artificial Sequence; identical to SEQ ID NO: 1146
  Description of Artificial Sequence: Synthetic peptide
  MOD_RES (7)..(7): Any L- or D-natural amino acid and any non-natural amino acid; see specification as filed for detailed description of substitutions, R-groups and preferred embodiments
  MOD_RES (10)..(11): Any L- or D-natural amino acid and any non-natural amino acid; see specification as filed for detailed description of substitutions, R-groups and preferred embodiments
  MOD_RES (14)..(14): Any L- or D-natural amino acid and any non-natural amino acid; see specification as filed for detailed description of substitutions, R-groups and preferred embodiments
  MOD_RES (15)..(18): Any L- or D-natural or non-natural amino acid, and this range may encompass 1 or 4 residues; see specification as filed for detailed description of substitutions, R-groups and preferred embodiments
  c-term may be amidated

SEQ ID NO: 1277 - protein, 31 aa, Artificial Sequence; identical to SEQ ID NO: 1147
  Description of Artificial Sequence: Synthetic peptide
  MOD_RES (8)..(8): Any L- or D-natural amino acid and any non-natural amino acid; see specification as filed for detailed description of substitutions, R-groups and preferred embodiments
  MOD_RES (10)..(11): Any L- or D-natural amino acid and any non-natural amino acid; see specification as filed for detailed description of substitutions, R-groups and preferred embodiments
  MOD_RES (14)..(14): Any L- or D-natural amino acid and any non-natural amino acid; see specification as filed for detailed description of substitutions, R-groups and preferred embodiments
  MOD_RES (15)..(18): Any L- or D-natural or non-natural amino acid, and this range may encompass 1 or 4 residues; see specification as filed for detailed description of substitutions, R-groups and preferred embodiments
  c-term may be amidated

SEQ ID NO: 1278 - protein, 31 aa, Artificial Sequence; identical to SEQ ID NO: 1148
  Description of Artificial Sequence: Synthetic peptide
  MOD_RES (9)..(11): Any L- or D-natural amino acid and any non-natural amino acid; see specification as filed for detailed description of substitutions, R-groups and preferred embodiments
  MOD_RES (14)..(14): Any L- or D-natural amino acid and any non-natural amino acid; see specification as filed for detailed description of substitutions, R-groups and preferred embodiments
  MOD_RES (15)..(18): Any L- or D-natural or non-natural amino acid, and this range may encompass 1 or 4 residues; see specification as filed for detailed description of substitutions, R-groups and preferred embodiments
  c-term may be amidated

SEQ ID NO: 1279 - protein, 34 aa, Artificial Sequence; identical to SEQ ID NO: 1149
  Description of Artificial Sequence: Synthetic peptide
  MOD_RES (18)..(21): Any L- or D-natural or non-natural amino acid, and this range may encompass 1 or 4 residues; see specification as filed for detailed description of substitutions, R-groups and preferred embodiments
  c-term may be amidated

SEQ ID NO: 1280 - protein, 34 aa, Artificial Sequence; identical to SEQ ID NO: 1150
  Description of Artificial Sequence: Synthetic peptide
  MOD_RES (10)..(11): Any L- or D-natural amino acid and any non-natural amino acid; see specification as filed for detailed description of substitutions, R-groups and preferred embodiments
  MOD_RES (18)..(21): Any L- or D-natural or non-natural amino acid, and this range may encompass 1 or 4 residues; see specification as filed for detailed description of substitutions, R-groups and preferred embodiments
  c-term may be amidated

SEQ ID NO: 1281 - protein, 34 aa, Artificial Sequence; identical to SEQ ID NO: 1151
  Description of Artificial Sequence: Synthetic peptide
  MOD_RES (1)..(1): Any L- or D-natural amino acid and any non-natural amino acid; see specification as filed for detailed description of substitutions, R-groups and preferred embodiments
  MOD_RES (10)..(11): Any L- or D-natural amino acid and any non-natural amino acid; see specification as filed for detailed description of substitutions, R-groups and preferred embodiments
  MOD_RES (18)..(21): Any L- or D-natural or non-natural amino acid, and this range may encompass 1 or 4 residues; see specification as filed for detailed description of substitutions, R-groups and preferred embodiments
  c-term may be amidated

SEQ ID NO: 1282 - protein, 34 aa, Artificial Sequence; identical to SEQ ID NO: 1152
  Description of Artificial Sequence: Synthetic peptide
  MOD_RES (2)..(2): Any L- or D-natural amino acid and any non-natural amino acid; see specification as filed for detailed description of substitutions, R-groups and preferred embodiments
  MOD_RES (10)..(11): Any L- or D-natural amino acid and any non-natural amino acid; see specification as filed for detailed description of substitutions, R-groups and preferred embodiments
  MOD_RES (18)..(21): Any L- or D-natural or non-natural amino acid, and this range may encompass 1 or 4 residues; see specification as filed for detailed description of substitutions, R-groups and preferred embodiments
  c-term may be amidated

SEQ ID NO: 1283 - protein, 34 aa, Artificial Sequence; identical to SEQ ID NO: 1153
  Description of Artificial Sequence: Synthetic peptide
  MOD_RES (3)..(3): Any L- or D-natural amino acid and any non-natural amino acid; see specification as filed for detailed description of substitutions, R-groups and preferred embodiments
  MOD_RES (10)..(11): Any L- or D-natural amino acid and any non-natural amino acid; see specification as filed for detailed description of substitutions, R-groups and preferred embodiments
  MOD_RES (18)..(21): Any L- or D-natural or non-natural amino acid, and this range may encompass 1 or 4 residues; see specification as filed for detailed description of substitutions, R-groups and preferred embodiments
  c-term may be amidated

SEQ ID NO: 1284 - protein, 34 aa, Artificial Sequence; identical to SEQ ID NO: 1154
  Description of Artificial Sequence: Synthetic peptide
  MOD_RES (4)..(4): Any L- or D-natural amino acid and any non-natural amino acid; see specification as filed for detailed description of substitutions, R-groups and preferred embodiments
  MOD_RES (10)..(11): Any L- or D-natural amino acid and any non-natural amino acid; see specification as filed for detailed description of substitutions, R-groups and preferred embodiments
  MOD_RES (18)..(21): Any L- or D-natural or non-natural amino acid, and this range may encompass 1 or 4 residues; see specification as filed for detailed description of substitutions, R-groups and preferred embodiments
  c-term may be amidated

SEQ ID NO: 1285 - protein, 34 aa, Artificial Sequence; identical to SEQ ID NO: 1155
  Description of Artificial Sequence: Synthetic peptide
  MOD_RES (5)..(5): Any L- or D-natural amino acid and any non-natural amino acid; see specification as filed for detailed description of substitutions, R-groups and preferred embodiments
  MOD_RES (10)..(11): Any L- or D-natural amino acid and any non-natural amino acid; see specification as filed for detailed description of substitutions, R-groups and preferred embodiments
  MOD_RES (18)..(21): Any L- or D-natural or non-natural amino acid, and this range may encompass 1 or 4 residues; see specification as filed for detailed description of substitutions, R-groups and preferred embodiments
  c-term may be amidated

SEQ ID NO: 1286 - protein, 34 aa, Artificial Sequence; identical to SEQ ID NO: 1156
  Description of Artificial Sequence: Synthetic peptide
  MOD_RES (6)..(6): Any L- or D-natural amino acid and any non-natural amino acid; see specification as filed for detailed description of substitutions, R-groups and preferred embodiments
  MOD_RES (10)..(11): Any L- or D-natural amino acid and any non-natural amino acid; see specification as filed for detailed description of substitutions, R-groups and preferred embodiments
  MOD_RES (18)..(21): Any L- or D-natural or non-natural amino acid, and this range may encompass 1 or 4 residues; see specification as filed for detailed description of substitutions, R-groups and preferred embodiments
  c-term may be amidated

SEQ ID NO: 1287 - protein, 34 aa, Artificial Sequence; identical to SEQ ID NO: 1157
  Description of Artificial Sequence: Synthetic peptide
  MOD_RES (7)..(7): Any L- or D-natural amino acid and any non-natural amino acid; see specification as filed for detailed description of substitutions, R-groups and preferred embodiments
  MOD_RES (10)..(11): Any L- or D-natural amino acid and any non-natural amino acid; see specification as filed for detailed description of substitutions, R-groups and preferred embodiments
  MOD_RES (18)..(21): Any L- or D-natural or non-natural amino acid, and this range may encompass 1 or 4 residues; see specification as filed for detailed description of substitutions, R-groups and preferred embodiments
  c-term may be amidated

SEQ ID NO: 1288 - protein, 34 aa, Artificial Sequence; identical to SEQ ID NO: 1158
  Description of Artificial Sequence: Synthetic peptide
  MOD_RES (8)..(8): Any L- or D-natural amino acid and any non-natural amino acid; see specification as filed for detailed description of substitutions, R-groups and preferred embodiments
  MOD_RES (10)..(11): Any L- or D-natural amino acid and any non-natural amino acid; see specification as filed for detailed description of substitutions, R-groups and preferred embodiments
  MOD_RES (18)..(21): Any L- or D-natural or non-natural amino acid, and this range may encompass 1 or 4 residues; see specification as filed for detailed description of substitutions, R-groups and preferred embodiments
  c-term may be amidated

SEQ ID NO: 1289 - protein, 34 aa, Artificial Sequence; identical to SEQ ID NO: 1159
  Description of Artificial Sequence: Synthetic peptide
  MOD_RES (9)..(11): Any L- or D-natural amino acid and any non-natural amino acid; see specification as filed for detailed description of substitutions, R-groups and preferred embodiments
  MOD_RES (18)..(21): Any L- or D-natural or non-natural amino acid, and this range may encompass 1 or 4 residues; see specification as filed for detailed description of substitutions, R-groups and preferred embodiments
  c-term may be amidated

SEQ ID NO: 1290 - protein, 34 aa, Artificial Sequence; identical to SEQ ID NO: 1160
  Description of Artificial Sequence: Synthetic peptide
  MOD_RES (12)..(12): Any L- or D-natural amino acid and any non-natural amino acid; see specification as filed for detailed description of substitutions, R-groups and preferred embodiments
  MOD_RES (18)..(21): Any L- or D-natural or non-natural amino acid, and this range may encompass 1 or 4 residues; see specification as filed for detailed description of substitutions, R-groups and preferred embodiments
  c-term may be amidated

SEQ ID NO: 1291 - protein, 34 aa, Artificial Sequence; identical to SEQ ID NO: 1161
  Description of Artificial Sequence: Synthetic peptide
  MOD_RES (10)..(12): Any L- or D-natural amino acid and any non-natural amino acid; see specification as filed for detailed description of substitutions, R-groups and preferred embodiments
  MOD_RES (18)..(21): Any L- or D-natural or non-natural amino acid, and this range may encompass 1 or 4 residues; see specification as filed for detailed description of substitutions, R-groups and preferred embodiments
  c-term may be amidated

SEQ ID NO: 1292 - protein, 34 aa, Artificial Sequence; identical to SEQ ID NO: 1162
  Description of Artificial Sequence: Synthetic peptide
  MOD_RES (1)..(1): Any L- or D-natural amino acid and any non-natural amino acid; see specification as filed for detailed description of substitutions, R-groups and preferred embodiments
  MOD_RES (10)..(12): Any L- or D-natural amino acid and any non-natural amino acid; see specification as filed for detailed description of substitutions, R-groups and preferred embodiments
  MOD_RES (18)..(21): Any L- or D-natural or non-natural amino acid, and this range may encompass 1 or 4 residues; see specification as filed for detailed description of substitutions, R-groups and preferred embodiments
  c-term may be amidated

SEQ ID NO: 1293 - protein, 34 aa, Artificial Sequence; identical to SEQ ID NO: 1163
  Description of Artificial Sequence: Synthetic peptide
  MOD_RES (2)..(2): Any L- or D-natural amino acid and any non-natural amino acid; see specification as filed for detailed description of substitutions, R-groups and preferred embodiments
  MOD_RES (10)..(12): Any L- or D-natural amino acid and any non-natural amino acid; see specification as filed for detailed description of substitutions, R-groups and preferred embodiments
  MOD_RES (18)..(21): Any L- or D-natural or non-natural amino acid, and this range may encompass 1 or 4 residues; see specification as filed for detailed description of substitutions, R-groups and preferred embodiments
  c-term may be amidated

SEQ ID NO: 1294 - protein, 34 aa, Artificial Sequence; identical to SEQ ID NO: 1164
  Description of Artificial Sequence: Synthetic peptide
  MOD_RES (3)..(3): Any L- or D-natural amino acid and any non-natural amino acid; see specification as filed for detailed description of substitutions, R-groups and preferred embodiments
  MOD_RES (10)..(12): Any L- or D-natural amino acid and any non-natural amino acid; see specification as filed for detailed description of substitutions, R-groups and preferred embodiments
  MOD_RES (18)..(21): Any L- or D-natural or non-natural amino acid, and this range may encompass 1 or 4 residues; see specification as filed for detailed description of substitutions, R-groups and preferred embodiments
  c-term may be amidated

SEQ ID NO: 1295 - protein, 34 aa, Artificial Sequence; identical to SEQ ID NO: 1165
  Description of Artificial Sequence: Synthetic peptide
  MOD_RES (4)..(4): Any L- or D-natural amino acid and any non-natural amino acid; see specification as filed for detailed description of substitutions, R-groups and preferred embodiments
  MOD_RES (10)..(12): Any L- or D-natural amino acid and any non-natural amino acid; see specification as filed for detailed description of substitutions, R-groups and preferred embodiments
  MOD_RES (18)..(21): Any L- or D-natural or non-natural amino acid, and this range may encompass 1 or 4 residues; see specification as filed for detailed description of substitutions, R-groups and preferred embodiments
  c-term may be amidated

SEQ ID NO: 1296 - protein, 34 aa, Artificial Sequence; identical to SEQ ID NO: 1166
  Description of Artificial Sequence: Synthetic peptide
  MOD_RES (5)..(5): Any L- or D-natural amino acid and any non-natural amino acid; see specification as filed for detailed description of substitutions, R-groups and preferred embodiments
  MOD_RES (10)..(12): Any L- or D-natural amino acid and any non-natural amino acid; see specification as filed for detailed description of substitutions, R-groups and preferred embodiments
  MOD_RES (18)..(21): Any L- or D-natural or non-natural amino acid, and this range may encompass 1 or 4 residues; see specification as filed for detailed description of substitutions, R-groups and preferred embodiments
  c-term may be amidated

SEQ ID NO: 1297 - protein, 34 aa, Artificial Sequence; identical to SEQ ID NO: 1167
  Description of Artificial Sequence: Synthetic peptide
  MOD_RES (6)..(6): Any L- or D-natural amino acid and any non-natural amino acid; see specification as filed for detailed description of substitutions, R-groups and preferred embodiments
  MOD_RES (10)..(12): Any L- or D-natural amino acid and any non-natural amino acid; see specification as filed for detailed description of substitutions, R-groups and preferred embodiments
  MOD_RES (18)..(21): Any L- or D-natural or non-natural amino acid, and this range may encompass 1 or 4 residues; see specification as filed for detailed description of substitutions, R-groups and preferred embodiments
  c-term may be amidated

SEQ ID NO: 1298 - protein, 34 aa, Artificial Sequence; identical to SEQ ID NO: 1168
  Description of Artificial Sequence: Synthetic peptide
  MOD_RES (7)..(7): Any L- or D-natural amino acid and any non-natural amino acid; see specification as filed for detailed description of substitutions, R-groups and preferred embodiments
  MOD_RES (10)..(12): Any L- or D-natural amino acid and any non-natural amino acid; see specification as filed for detailed description of substitutions, R-groups and preferred embodiments
  MOD_RES (18)..(21): Any L- or D-natural or non-natural amino acid, and this range may encompass 1 or 4 residues; see specification as filed for detailed description of substitutions, R-groups and preferred embodiments
  c-term may be amidated

SEQ ID NO: 1299 - protein, 34 aa, Artificial Sequence; identical to SEQ ID NO: 1169
  Description of Artificial Sequence: Synthetic peptide
  MOD_RES (8)..(8): Any L- or D-natural amino acid and any non-natural amino acid; see specification as filed for detailed description of substitutions, R-groups and preferred embodiments
  MOD_RES (10)..(12): Any L- or D-natural amino acid and any non-natural amino acid; see specification as filed for detailed description of substitutions, R-groups and preferred embodiments
  MOD_RES (18)..(21): Any L- or D-natural or non-natural amino acid, and this range may encompass 1 or 4 residues; see specification as filed for detailed description of substitutions, R-groups and preferred embodiments
  c-term may be amidated

SEQ ID NO: 1300 - protein, 34 aa, Artificial Sequence; identical to SEQ ID NO: 1170
  Description of Artificial Sequence: Synthetic peptide
  MOD_RES (9)..(12): Any L- or D-natural amino acid and any non-natural amino acid; see specification as filed for detailed description of substitutions, R-groups and preferred embodiments
  MOD_RES (18)..(21): Any L- or D-natural or non-natural amino acid, and this range may encompass 1 or 4 residues; see specification as filed for detailed description of substitutions, R-groups and preferred embodiments
  c-term may be amidated

SEQ ID NO: 1301 - protein, 34 aa, Artificial Sequence; identical to SEQ ID NO: 1171
  Description of Artificial Sequence: Synthetic peptide
  MOD_RES (13)..(13): Any L- or D-natural amino acid and any non-natural amino acid; see specification as filed for detailed description of substitutions, R-groups and preferred embodiments
  MOD_RES (18)..(21): Any L- or D-natural or non-natural amino acid, and this range may encompass 1 or 4 residues; see specification as filed for detailed description of substitutions, R-groups and preferred embodiments
  c-term may be amidated

SEQ ID NO: 1302 - protein, 34 aa, Artificial Sequence; identical to SEQ ID NO: 1172
  Description of Artificial Sequence: Synthetic peptide
  MOD_RES (10)..(11): Any L- or D-natural amino acid and any non-natural amino acid; see specification as filed for detailed description of substitutions, R-groups and preferred embodiments
  MOD_RES (13)..(13): Any L- or D-natural amino acid and any non-natural amino acid; see specification as filed for detailed description of substitutions, R-groups and preferred embodiments
  MOD_RES (18)..(21): Any L- or D-natural or non-natural amino acid, and this range may encompass 1 or 4 residues; see specification as filed for detailed description of substitutions, R-groups and preferred embodiments
  c-term may be amidated

SEQ ID NO: 1303 - protein, 34 aa, Artificial Sequence; identical to SEQ ID NO: 1173
  Description of Artificial Sequence: Synthetic peptide
  MOD_RES (1)..(1): Any L- or D-natural amino acid and any non-natural amino acid; see specification as filed for detailed description of substitutions, R-groups and preferred embodiments
  MOD_RES (10)..(11): Any L- or D-natural amino acid and any non-natural amino acid; see specification as filed for detailed description of substitutions, R-groups and preferred embodiments
  MOD_RES (13)..(13): Any L- or D-natural amino acid and any non-natural amino acid; see specification as filed for detailed description of substitutions, R-groups and preferred embodiments
  MOD_RES (18)..(21): Any L- or D-natural or non-natural amino acid, and this range may encompass 1 or 4 residues; see specification as filed for detailed description of substitutions, R-groups and preferred embodiments
  c-term may be amidated

SEQ ID NO: 1304 - protein, 34 aa, Artificial Sequence; identical to SEQ ID NO: 1174
  Description of Artificial Sequence: Synthetic peptide
  MOD_RES (2)..(2): Any L- or D-natural amino acid and any non-natural amino acid; see specification as filed for detailed description of substitutions, R-groups and preferred embodiments
  MOD_RES (10)..(11): Any L- or D-natural amino acid and any non-natural amino acid; see specification as filed for detailed description of substitutions, R-groups and preferred embodiments
  MOD_RES (13)..(13): Any L- or D-natural amino acid and any non-natural amino acid; see specification as filed for detailed description of substitutions, R-groups and preferred embodiments
  MOD_RES (18)..(21): Any L- or D-natural or non-natural amino acid, and this range may encompass 1 or 4 residues; see specification as filed for detailed description of substitutions, R-groups and preferred embodiments
  c-term may be amidated

SEQ ID NO: 1305 - protein, 34 aa, Artificial Sequence; identical to SEQ ID NO: 1175
  Description of Artificial Sequence: Synthetic peptide
  MOD_RES (3)..(3): Any L- or D-natural amino acid and any non-natural amino acid; see specification as filed for detailed description of substitutions, R-groups and preferred embodiments
  MOD_RES (10)..(11): Any L- or D-natural amino acid and any non-natural amino acid; see specification as filed for detailed description of substitutions, R-groups and preferred embodiments
  MOD_RES (13)..(13): Any L- or D-natural amino acid and any non-natural amino acid; see specification as filed for detailed description of substitutions, R-groups and preferred embodiments
  MOD_RES (18)..(21): Any L- or D-natural or non-natural amino acid, and this range may encompass 1 or 4 residues; see specification as filed for detailed description of substitutions, R-groups and preferred embodiments
  c-term may be amidated

SEQ ID NO: 1306 - protein, 34 aa, Artificial Sequence; identical to SEQ ID NO: 1176
  Description of Artificial Sequence: Synthetic peptide
  MOD_RES (4)..(4): Any L- or D-natural amino acid and any non-natural amino acid; see specification as filed for detailed description of substitutions, R-groups and preferred embodiments
  MOD_RES (10)..(11): Any L- or D-natural amino acid and any non-natural amino acid; see specification as filed for detailed description of substitutions, R-groups and preferred embodiments
  MOD_RES (13)..(13): Any L- or D-natural amino acid and any non-natural amino acid; see specification as filed for detailed description of substitutions, R-groups and preferred embodiments
  MOD_RES (18)..(21): Any L- or D-natural or non-natural amino acid, and this range may encompass 1 or 4 residues; see specification as filed for detailed description of substitutions, R-groups and preferred embodiments
  c-term may be amidated

SEQ ID NO: 1307 - protein, 34 aa, Artificial Sequence; identical to SEQ ID NO: 1177
  Description of Artificial Sequence: Synthetic peptide
  MOD_RES (5)..(5): Any L- or D-natural amino acid and any non-natural amino acid; see specification as filed for detailed description of substitutions, R-groups and preferred embodiments
  MOD_RES (10)..(11): Any L- or D-natural amino acid and any non-natural amino acid; see specification as filed for detailed description of substitutions, R-groups and preferred embodiments
  MOD_RES (13)..(13): Any L- or D-natural amino acid and any non-natural amino acid; see specification as filed for detailed description of substitutions, R-groups and preferred embodiments
  MOD_RES (18)..(21): Any L- or D-natural or non-natural amino acid, and this range may encompass 1 or 4 residues; see specification as filed for detailed description of substitutions, R-groups and preferred embodiments
  c-term may be amidated

SEQ ID NO: 1308 - protein, 34 aa, Artificial Sequence; identical to SEQ ID NO: 1178
  Description of Artificial Sequence: Synthetic peptide
  MOD_RES (6)..(6): Any L- or D-natural amino acid and any non-natural amino acid; see specification as filed for detailed description of substitutions, R-groups and preferred embodiments
  MOD_RES (10)..(11): Any L- or D-natural amino acid and any non-natural amino acid; see specification as filed for detailed description of substitutions, R-groups and preferred embodiments
  MOD_RES (13)..(13): Any L- or D-natural amino acid and any non-natural amino acid; see specification as filed for detailed description of substitutions, R-groups and preferred embodiments
  MOD_RES (18)..(21): Any L- or D-natural or non-natural amino acid, and this range may encompass 1 or 4 residues; see specification as filed for detailed description of substitutions, R-groups and preferred embodiments
  c-term may be amidated

SEQ ID NO: 1309 - protein, 34 aa, Artificial Sequence; identical to SEQ ID NO: 1179
  Description of Artificial Sequence: Synthetic peptide
  MOD_RES (7)..(7): Any L- or D-natural amino acid and any non-natural amino acid; see specification as filed for detailed description of substitutions, R-groups and preferred embodiments
  MOD_RES (10)..(11): Any L- or D-natural amino acid and any non-natural amino acid; see specification as filed for detailed description of substitutions, R-groups and preferred embodiments
  MOD_RES (13)..(13): Any L- or D-natural amino acid and any non-natural amino acid; see specification as filed for detailed description of substitutions, R-groups and preferred embodiments
  MOD_RES (18)..(21): Any L- or D-natural or non-natural amino acid, and this range may encompass 1 or 4 residues; see specification as filed for detailed description of substitutions, R-groups and preferred embodiments
  c-term may be amidated

SEQ ID NO: 1310 - protein, 34 aa, Artificial Sequence; identical to SEQ ID NO: 1180
  Description of Artificial Sequence: Synthetic peptide
  MOD_RES (8)..(8): Any L- or D-natural amino acid and any non-natural amino acid; see specification as filed for detailed description of substitutions, R-groups and preferred embodiments
  MOD_RES (10)..(11): Any L- or D-natural amino acid and any non-natural amino acid; see specification as filed for detailed description of substitutions, R-groups and preferred embodiments
  MOD_RES (13)..(13): Any L- or D-natural amino acid and any non-natural amino acid; see specification as filed for detailed description of substitutions, R-groups and preferred embodiments
  MOD_RES (18)..(21): Any L- or D-natural or non-natural amino acid, and this range may encompass 1 or 4 residues; see specification as filed for detailed description of substitutions, R-groups and preferred embodiments
  c-term may be amidated

SEQ ID NO: 1311 - protein, 34 aa, Artificial Sequence; identical to SEQ ID NO: 1181
  Description of Artificial Sequence: Synthetic peptide
  MOD_RES (9)..(11): Any L- or D-natural amino acid and any non-natural amino acid; see specification as filed for detailed description of substitutions, R-groups and preferred embodiments
  MOD_RES (13)..(13): Any L- or D-natural amino acid and any non-natural amino acid; see specification as filed for detailed description of substitutions, R-groups and preferred embodiments
  MOD_RES (18)..(21): Any L- or D-natural or non-natural amino acid, and this range may encompass 1 or 4 residues; see specification as filed for detailed description of substitutions, R-groups and preferred embodiments
  c-term may be amidated

SEQ ID NO: 1312 - protein, 34 aa, Artificial Sequence; identical to SEQ ID NO: 1182
  Description of Artificial Sequence: Synthetic peptide
  MOD_RES (14)..(14): Any L- or D-natural amino acid and any non-natural amino acid; see specification as filed for detailed description of substitutions, R-groups and preferred embodiments
  MOD_RES (18)..(21): Any L- or D-natural or non-natural amino acid, and this range may encompass 1 or 4 residues; see specification as filed for detailed description of substitutions, R-groups and preferred embodiments
  c-term may be amidated

SEQ ID NO: 1313 - protein, 34 aa, Artificial Sequence; identical to SEQ ID NO: 1183
  Description of Artificial Sequence: Synthetic peptide
  MOD_RES (10)..(11): Any L- or D-natural amino acid and any non-natural amino acid; see specification as filed for detailed description of substitutions, R-groups and preferred embodiments
  MOD_RES (14)..(14): Any L- or D-natural amino acid and any non-natural amino acid; see specification as filed for detailed description of substitutions, R-groups and preferred embodiments
  MOD_RES (18)..(21): Any L- or D-natural or non-natural amino acid, and this range may encompass 1 or 4 residues; see specification as filed for detailed description of substitutions, R-groups and preferred embodiments
  c-term may be amidated

SEQ ID NO: 1314 - protein, 34 aa, Artificial Sequence; identical to SEQ ID NO: 1184
  Description of Artificial Sequence: Synthetic peptide
  MOD_RES (1)..(1): Any L- or D-natural amino acid and any non-natural amino acid; see specification as filed for detailed description of substitutions, R-groups and preferred embodiments
  MOD_RES (10)..(11): Any L- or D-natural amino acid and any non-natural amino acid; see specification as filed for detailed description of substitutions, R-groups and preferred embodiments
  MOD_RES (14)..(14): Any L- or D-natural amino acid and any non-natural amino acid; see specification as filed for detailed description of substitutions, R-groups and preferred embodiments
  MOD_RES (18)..(21): Any L- or D-natural or non-natural amino acid, and this range may encompass 1 or 4 residues; see specification as filed for detailed description of substitutions, R-groups and preferred embodiments
  c-term may be amidated

SEQ ID NO: 1315 - protein, 34 aa, Artificial Sequence; identical to SEQ ID NO: 1185
  Description of Artificial Sequence: Synthetic peptide
  MOD_RES (2)..(2): Any L- or D-natural amino acid and any non-natural amino acid; see specification as filed for detailed description of substitutions, R-groups and preferred embodiments
  MOD_RES (10)..(11): Any L- or D-natural amino acid and any non-natural amino acid; see specification as filed for detailed description of substitutions, R-groups and preferred embodiments
  MOD_RES (14)..(14): Any L- or D-natural amino acid and any non-natural amino acid; see specification as filed for detailed description of substitutions, R-groups and preferred embodiments
  MOD_RES (18)..(21): Any L- or D-natural or non-natural amino acid, and this range may encompass 1 or 4 residues; see specification as filed for detailed description of substitutions, R-groups and preferred embodiments
  c-term may be amidated

SEQ ID NO: 1316 - protein, 34 aa, Artificial Sequence; identical to SEQ ID NO: 1186
  Description of Artificial Sequence: Synthetic peptide
  MOD_RES (3)..(3): Any L- or D-natural amino acid and any non-natural amino acid; see specification as filed for detailed description of substitutions, R-groups and preferred embodiments
  MOD_RES (10)..(11): Any L- or D-natural amino acid and any non-natural amino acid; see specification as filed for detailed description of substitutions, R-groups and preferred embodiments
  MOD_RES (14)..(14): Any L- or D-natural amino acid and any non-natural amino acid; see specification as filed for detailed description of substitutions, R-groups and preferred embodiments
  MOD_RES (18)..(21): Any L- or D-natural or non-natural amino acid, and this range may encompass 1 or 4 residues; see specification as filed for detailed description of substitutions, R-groups and preferred embodiments
  c-term may be amidated

SEQ ID NO: 1317 - protein, 34 aa, Artificial Sequence; identical to SEQ ID NO: 1187
  Description of Artificial Sequence: Synthetic peptide
  MOD_RES (4)..(4): Any L- or D-natural amino acid and any non-natural amino acid; see specification as filed for detailed description of substitutions, R-groups and preferred embodiments
  MOD_RES (10)..(11): Any L- or D-natural amino acid and any non-natural amino acid; see specification as filed for detailed description of substitutions, R-groups and preferred embodiments
  MOD_RES (14)..(14): Any L- or D-natural amino acid and any non-natural amino acid; see specification as filed for detailed description of substitutions, R-groups and preferred embodiments
  MOD_RES (18)..(21): Any L- or D-natural or non-natural amino acid, and this range may encompass 1 or 4 residues; see specification as filed for detailed description of substitutions, R-groups and preferred embodiments
  c-term may be amidated

SEQ ID NO: 1318 - protein, 34 aa, Artificial Sequence; identical to SEQ ID NO: 1188
  Description of Artificial Sequence: Synthetic peptide
  MOD_RES (5)..(5): Any L- or D-natural amino acid and any non-natural amino acid; see specification as filed for detailed description of substitutions, R-groups and preferred embodiments
  MOD_RES (10)..(11): Any L- or D-natural amino acid and any non-natural amino acid; see specification as filed for detailed description of substitutions, R-groups and preferred embodiments
  MOD_RES (14)..(14): Any L- or D-natural amino acid and any non-natural amino acid; see specification as filed for detailed description of substitutions, R-groups and preferred embodiments
  MOD_RES (18)..(21): Any L- or D-natural or non-natural amino acid, and this range may encompass 1 or 4 residues; see specification as filed for detailed description of substitutions, R-groups and preferred embodiments
  c-term may be amidated

SEQ ID NO: 1319 - protein, 34 aa, Artificial Sequence; identical to SEQ ID NO: 1189
  Description of Artificial Sequence: Synthetic peptide
  MOD_RES (6)..(6): Any L- or D-natural amino acid and any non-natural amino acid; see specification as filed for detailed description of substitutions, R-groups and preferred embodiments
  MOD_RES (10)..(11): Any L- or D-natural amino acid and any non-natural amino acid; see specification as filed for detailed description of substitutions, R-groups and preferred embodiments
  MOD_RES (14)..(14): Any L- or D-natural amino acid and any non-natural amino acid; see specification as filed for detailed description of substitutions, R-groups and preferred embodiments
  MOD_RES (18)..(21): Any L- or D-natural or non-natural amino acid, and this range may encompass 1 or 4 residues; see specification as filed for detailed description of substitutions, R-groups and preferred embodiments
  c-term may be amidated

SEQ ID NO: 1320 - protein, 34 aa, Artificial Sequence; identical to SEQ ID NO: 1190
  Description of Artificial Sequence: Synthetic peptide
  MOD_RES (7)..(7): Any L- or D-natural amino acid and any non-natural amino acid; see specification as filed for detailed description of substitutions, R-groups and preferred embodiments
  MOD_RES (10)..(11): Any L- or D-natural amino acid and any non-natural amino acid; see specification as filed for detailed description of substitutions, R-groups and preferred embodiments
  MOD_RES (14)..(14): Any L- or D-natural amino acid and any non-natural amino acid; see specification as filed for detailed description of substitutions, R-groups and preferred embodiments
  MOD_RES (18)..(21): Any L- or D-natural or non-natural amino acid, and this range may encompass 1 or 4 residues; see specification as filed for detailed description of substitutions, R-groups and preferred embodiments
  c-term may be amidated

SEQ ID NO: 1321 - protein, 34 aa, Artificial Sequence; identical to SEQ ID NO: 1191
  Description of Artificial Sequence: Synthetic peptide
  MOD_RES (8)..(8): Any L- or D-natural amino acid and any non-natural amino acid; see specification as filed for detailed description of substitutions, R-groups and preferred embodiments
  MOD_RES (10)..(11): Any L- or D-natural amino acid and any non-natural amino acid; see specification as filed for detailed description of substitutions, R-groups and preferred embodiments
  MOD_RES (14)..(14): Any L- or D-natural amino acid and any non-natural amino acid; see specification as filed for detailed description of substitutions, R-groups and preferred embodiments
  MOD_RES (18)..(21): Any L- or D-natural or non-natural amino acid, and this range may encompass 1 or 4 residues; see specification as filed for detailed description of substitutions, R-groups and preferred embodiments
  c-term may be amidated

SEQ ID NO: 1322 - protein, 34 aa, Artificial Sequence; identical to SEQ ID NO: 1192
  Description of Artificial Sequence: Synthetic peptide
  MOD_RES (9)..(11): Any L- or D-natural amino acid and any non-natural amino acid; see specification as filed for detailed description of substitutions, R-groups and preferred embodiments
  MOD_RES (14)..(14): Any L- or D-natural amino acid and any non-natural amino acid; see specification as filed for detailed description of substitutions, R-groups and preferred embodiments
  MOD_RES (18)..(21): Any L- or D-natural or non-natural amino acid, and this range may encompass 1 or 4 residues; see specification as filed for detailed description of substitutions, R-groups and preferred embodiments
  c-term may be amidated

SEQ ID NO: 1323 - protein, 34 aa, Artificial Sequence; identical to SEQ ID NO: 1193
  Description of Artificial Sequence: Synthetic peptide
  MOD_RES (15)..(15): Any L- or D-natural amino acid and any non-natural amino acid; see specification as filed for detailed description of substitutions, R-groups and preferred embodiments
  MOD_RES (18)..(21): Any L- or D-natural or non-natural amino acid, and this range may encompass 1 or 4 residues; see specification as filed for detailed description of substitutions, R-groups and preferred embodiments
  c-term may be amidated

SEQ ID NO: 1324 - protein, 34 aa, Artificial Sequence; identical to SEQ ID NO: 1194
  Description of Artificial Sequence: Synthetic peptide
  MOD_RES (10)..(11): Any L- or D-natural amino acid and any non-natural amino acid; see specification as filed for detailed description of substitutions, R-groups and preferred embodiments
  MOD_RES (15)..(15): Any L- or D-natural amino acid and any non-natural amino acid; see specification as filed for detailed description of substitutions, R-groups and preferred embodiments
  MOD_RES (18)..(21): Any L- or D-natural or non-natural amino acid, and this range may encompass 1 or 4 residues; see specification as filed for detailed description of substitutions, R-groups and preferred embodiments
  c-term may be amidated

SEQ ID NO: 1325 - protein, 34 aa, Artificial Sequence; identical to SEQ ID NO: 1195
  Description of Artificial Sequence: Synthetic peptide
  MOD_RES (1)..(1): Any L- or D-natural amino acid and any non-natural amino acid; see specification as filed for detailed description of substitutions, R-groups and preferred embodiments
  MOD_RES (10)..(11): Any L- or D-natural amino acid and any non-natural amino acid; see specification as filed for detailed description of substitutions, R-groups and preferred embodiments
  MOD_RES (15)..(15): Any L- or D-natural amino acid and any non-natural amino acid; see specification as filed for detailed description of substitutions, R-groups and preferred embodiments
  MOD_RES (18)..(21): Any L- or D-natural or non-natural amino acid, and this range may encompass 1 or 4 residues; see specification as filed for detailed description of substitutions, R-groups and preferred embodiments
  c-term may be amidated

SEQ ID NO: 1326 - protein, 34 aa, Artificial Sequence; identical to SEQ ID NO: 1196
  Description of Artificial Sequence: Synthetic peptide
  MOD_RES (2)..(2): Any L- or D-natural amino acid and any non-natural amino acid; see specification as filed for detailed description of substitutions, R-groups and preferred embodiments
  MOD_RES (10)..(11): Any L- or D-natural amino acid and any non-natural amino acid; see specification as filed for detailed description of substitutions, R-groups and preferred embodiments
  MOD_RES (15)..(15): Any L- or D-natural amino acid and any non-natural amino acid; see specification as filed for detailed description of substitutions, R-groups and preferred embodiments
  MOD_RES (18)..(21): Any L- or D-natural or non-natural amino acid, and this range may encompass 1 or 4 residues; see specification as filed for detailed description of substitutions, R-groups and preferred embodiments
  c-term may be amidated

SEQ ID NO: 1327 - protein, 34 aa, Artificial Sequence; identical to SEQ ID NO: 1197
  Description of Artificial Sequence: Synthetic peptide
  MOD_RES (3)..(3): Any L- or D-natural amino acid and any non-natural amino acid; see specification as filed for detailed description of substitutions, R-groups and preferred embodiments
  MOD_RES (10)..(11): Any L- or D-natural amino acid and any non-natural amino acid; see specification as filed for detailed description of substitutions, R-groups and preferred embodiments
  MOD_RES (15)..(15): Any L- or D-natural amino acid and any non-natural amino acid; see specification as filed for detailed description of substitutions, R-groups and preferred embodiments
  MOD_RES (18)..(21): Any L- or D-natural or non-natural amino acid, and this range may encompass 1 or 4 residues; see specification as filed for detailed description of substitutions, R-groups and preferred embodiments
  c-term may be amidated

SEQ ID NO: 1328 - protein, 34 aa, Artificial Sequence; identical to SEQ ID NO: 1198
  Description of Artificial Sequence: Synthetic peptide
  MOD_RES (4)..(4): Any L- or D-natural amino acid and any non-natural amino acid; see specification as filed for detailed description of substitutions, R-groups and preferred embodiments
  MOD_RES (10)..(11): Any L- or D-natural amino acid and any non-natural amino acid; see specification as filed for detailed description of substitutions, R-groups and preferred embodiments
  MOD_RES (15)..(15): Any L- or D-natural amino acid and any non-natural amino acid; see specification as filed for detailed description of substitutions, R-groups and preferred embodiments
  MOD_RES (18)..(21): Any L- or D-natural or non-natural amino acid, and this range may encompass 1 or 4 residues; see specification as filed for detailed description of substitutions, R-groups and preferred embodiments
  c-term may be amidated

SEQ ID NO: 1329 - protein, 34 aa, Artificial Sequence; identical to SEQ ID NO: 1199
  Description of Artificial Sequence: Synthetic peptide
  MOD_RES (5)..(5): Any L- or D-natural amino acid and any non-natural amino acid; see specification as filed for detailed description of substitutions, R-groups and preferred embodiments
  MOD_RES (10)..(11): Any L- or D-natural amino acid and any non-natural amino acid; see specification as filed for detailed description of substitutions, R-groups and preferred embodiments
  MOD_RES (15)..(15): Any L- or D-natural amino acid and any non-natural amino acid; see specification as filed for detailed description of substitutions, R-groups and preferred embodiments
  MOD_RES (18)..(21): Any L- or D-natural or non-natural amino acid, and this range may encompass 1 or 4 residues; see specification as filed for detailed description of substitutions, R-groups and preferred embodiments
  c-term may be amidated

SEQ ID NO: 1330 - protein, 34 aa, Artificial Sequence; identical to SEQ ID NO: 1200
  Description of Artificial Sequence: Synthetic peptide
  MOD_RES (6)..(6): Any L- or D-natural amino acid and any non-natural amino acid; see specification as filed for detailed description of substitutions, R-groups and preferred embodiments
  MOD_RES (10)..(11): Any L- or D-natural amino acid and any non-natural amino acid; see specification as filed for detailed description of substitutions, R-groups and preferred embodiments
  MOD_RES (15)..(15): Any L- or D-natural amino acid and any non-natural amino acid; see specification as filed for detailed description of substitutions, R-groups and preferred embodiments
  MOD_RES (18)..(21): Any L- or D-natural or non-natural amino acid, and this range may encompass 1 or 4 residues; see specification as filed for detailed description of substitutions, R-groups and preferred embodiments
  c-term may be amidated

SEQ ID NO: 1331 - protein, 34 aa, Artificial Sequence; identical to SEQ ID NO: 1201
  Description of Artificial Sequence: Synthetic peptide
  MOD_RES (7)..(7): Any L- or D-natural amino acid and any non-natural amino acid; see specification as filed for detailed description of substitutions, R-groups and preferred embodiments
  MOD_RES (10)..(11): Any L- or D-natural amino acid and any non-natural amino acid; see specification as filed for detailed description of substitutions, R-groups and preferred embodiments
  MOD_RES (15)..(15): Any L- or D-natural amino acid and any non-natural amino acid; see specification as filed for detailed description of substitutions, R-groups and preferred embodiments
  MOD_RES (18)..(21): Any L- or D-natural or non-natural amino acid, and this range may encompass 1 or 4 residues; see specification as filed for detailed description of substitutions, R-groups and preferred embodiments
  c-term may be amidated

SEQ ID NO: 1332 - protein, 34 aa, Artificial Sequence; identical to SEQ ID NO: 1202
  Description of Artificial Sequence: Synthetic peptide
  MOD_RES (8)..(8): Any L- or D-natural amino acid and any non-natural amino acid; see specification as filed for detailed description of substitutions, R-groups and preferred embodiments
  MOD_RES (10)..(11): Any L- or D-natural amino acid and any non-natural amino acid; see specification as filed for detailed description of substitutions, R-groups and preferred embodiments
  MOD_RES (15)..(15): Any L- or D-natural amino acid and any non-natural amino acid; see specification as filed for detailed description of substitutions, R-groups and preferred embodiments
  MOD_RES (18)..(21): Any L- or D-natural or non-natural amino acid, and this range may encompass 1 or 4 residues; see specification as filed for detailed description of substitutions, R-groups and preferred embodiments
  c-term may be amidated

SEQ ID NO: 1333 - protein, 34 aa, Artificial Sequence; identical to SEQ ID NO: 1203
  Description of Artificial Sequence: Synthetic peptide
  MOD_RES (9)..(11): Any L- or D-natural amino acid and any non-natural amino acid; see specification as filed for detailed description of substitutions, R-groups and preferred embodiments
  MOD_RES (15)..(15): Any L- or D-natural amino acid and any non-natural amino acid; see specification as filed for detailed description of substitutions, R-groups and preferred embodiments
  MOD_RES (18)..(21): Any L- or D-natural or non-natural amino acid, and this range may encompass 1 or 4 residues; see specification as filed for detailed description of substitutions, R-groups and preferred embodiments
  c-term may be amidated

SEQ ID NO: 1334 - protein, 34 aa, Artificial Sequence; identical to SEQ ID NO: 1204
  Description of Artificial Sequence: Synthetic peptide
  MOD_RES (16)..(16): Any L- or D-natural amino acid and any non-natural amino acid; see specification as filed for detailed description of substitutions, R-groups and preferred embodiments
  MOD_RES (18)..(21): Any L- or D-natural or non-natural amino acid, and this range may encompass 1 or 4 residues; see specification as filed for detailed description of substitutions, R-groups and preferred embodiments
  c-term may be amidated

SEQ ID NO: 1335 - protein, 34 aa, Artificial Sequence; identical to SEQ ID NO: 1205
  Description of Artificial Sequence: Synthetic peptide
  MOD_RES (10)..(11): Any L- or D-natural amino acid and any non-natural amino acid; see specification as filed for detailed description of substitutions, R-groups and preferred embodiments
  MOD_RES (16)..(16): Any L- or D-natural amino acid and any non-natural amino acid; see specification as filed for detailed description of substitutions, R-groups and preferred embodiments
  MOD_RES (18)..(21): Any L- or D-natural or non-natural amino acid, and this range may encompass 1 or 4 residues; see specification as filed for detailed description of substitutions, R-groups and preferred embodiments
  c-term may be amidated

SEQ ID NO: 1336 - protein, 34 aa, Artificial Sequence; identical to SEQ ID NO: 1206
  Description of Artificial Sequence: Synthetic peptide
  MOD_RES (1)..(1): Any L- or D-natural amino acid and any non-natural amino acid; see specification as filed for detailed description of substitutions, R-groups and preferred embodiments
  MOD_RES (10)..(11): Any L- or D-natural amino acid and any non-natural amino acid; see specification as filed for detailed description of substitutions, R-groups and preferred embodiments
  MOD_RES (16)..(16): Any L- or D-natural amino acid and any non-natural amino acid; see specification as filed for detailed description of substitutions, R-groups and preferred embodiments
  MOD_RES (18)..(21): Any L- or D-natural or non-natural amino acid, and this range may encompass 1 or 4 residues; see specification as filed for detailed description of substitutions, R-groups and preferred embodiments
  c-term may be amidated

SEQ ID NO: 1337 - protein, 34 aa, Artificial Sequence; identical to SEQ ID NO: 1207
  Description of Artificial Sequence: Synthetic peptide
  MOD_RES (2)..(2): Any L- or D-natural amino acid and any non-natural amino acid; see specification as filed for detailed description of substitutions, R-groups and preferred embodiments
  MOD_RES (10)..(11): Any L- or D-natural amino acid and any non-natural amino acid; see specification as filed for detailed description of substitutions, R-groups and preferred embodiments
  MOD_RES (16)..(16): Any L- or D-natural amino acid and any non-natural amino acid; see specification as filed for detailed description of substitutions, R-groups and preferred embodiments
  MOD_RES (18)..(21): Any L- or D-natural or non-natural amino acid, and this range may encompass 1 or 4 residues; see specification as filed for detailed description of substitutions, R-groups and preferred embodiments
  c-term may be amidated

SEQ ID NO: 1338 - protein, 34 aa, Artificial Sequence; identical to SEQ ID NO: 1208
  Description of Artificial Sequence: Synthetic peptide
  MOD_RES (3)..(3): Any L- or D-natural amino acid and any non-natural amino acid; see specification as filed for detailed description of substitutions, R-groups and preferred embodiments
  MOD_RES (10)..(11): Any L- or D-natural amino acid and any non-natural amino acid; see specification as filed for detailed description of substitutions, R-groups and preferred embodiments
  MOD_RES (16)..(16): Any L- or D-natural amino acid and any non-natural amino acid; see specification as filed for detailed description of substitutions, R-groups and preferred embodiments
  MOD_RES (18)..(21): Any L- or D-natural or non-natural amino acid, and this range may encompass 1 or 4 residues; see specification as filed for detailed description of substitutions, R-groups and preferred embodiments
  c-term may be amidated

SEQ ID NO: 1339 - protein, 34 aa, Artificial Sequence; identical to SEQ ID NO: 1209
  Description of Artificial Sequence: Synthetic peptide
  MOD_RES (4)..(4): Any L- or D-natural amino acid and any non-natural amino acid; see specification as filed for detailed description of substitutions, R-groups and preferred embodiments
  MOD_RES (10)..(11): Any L- or D-natural amino acid and any non-natural amino acid; see specification as filed for detailed description of substitutions, R-groups and preferred embodiments
  MOD_RES (16)..(16): Any L- or D-natural amino acid and any non-natural amino acid; see specification as filed for detailed description of substitutions, R-groups and preferred embodiments
  MOD_RES (18)..(21): Any L- or D-natural or non-natural amino acid, and this range may encompass 1 or 4 residues; see specification as filed for detailed description of substitutions, R-groups and preferred embodiments
  c-term may be amidated

SEQ ID NO: 1340 - protein, 34 aa, Artificial Sequence; identical to SEQ ID NO: 1210
  Description of Artificial Sequence: Synthetic peptide
  MOD_RES (17)..(17): Any L- or D-natural amino acid and any non-natural amino acid; see specification as filed for detailed description of substitutions, R-groups and preferred embodiments
  MOD_RES (18)..(21): Any L- or D-natural or non-natural amino acid, and this range may encompass 1 or 4 residues; see specification as filed for detailed description of substitutions, R-groups and preferred embodiments
  c-term may be amidated

SEQ ID NO: 1341 - protein, 34 aa, Artificial Sequence; identical to SEQ ID NO: 1211
  Description of Artificial Sequence: Synthetic peptide
  MOD_RES (10)..(11): Any L- or D-natural amino acid and any non-natural amino acid; see specification as filed for detailed description of substitutions, R-groups and preferred embodiments
  MOD_RES (17)..(17): Any L- or D-natural amino acid and any non-natural amino acid; see specification as filed for detailed description of substitutions, R-groups and preferred embodiments
  MOD_RES (18)..(21): Any L- or D-natural or non-natural amino acid, and this range may encompass 1 or 4 residues; see specification as filed for detailed description of substitutions, R-groups and preferred embodiments
  c-term may be amidated

SEQ ID NO: 1342 - protein, 34 aa, Artificial Sequence; identical to SEQ ID NO: 1212
  Description of Artificial Sequence: Synthetic peptide
  MOD_RES (1)..(1): Any L- or D-natural amino acid and any non-natural amino acid; see specification as filed for detailed description of substitutions, R-groups and preferred embodiments
  MOD_RES (10)..(11): Any L- or D-natural amino acid and any non-natural amino acid; see specification as filed for detailed description of substitutions, R-groups and preferred embodiments
  MOD_RES (17)..(17): Any L- or D-natural amino acid and any non-natural amino acid; see specification as filed for detailed description of substitutions, R-groups and preferred embodiments
  MOD_RES (18)..(21): Any L- or D-natural or non-natural amino acid, and this range may encompass 1 or 4 residues; see specification as filed for detailed description of substitutions, R-groups and preferred embodiments
  c-term may be amidated

SEQ ID NO: 1343 - protein, 34 aa, Artificial Sequence; identical to SEQ ID NO: 1213
  Description of Artificial Sequence: Synthetic peptide
  MOD_RES (2)..(2): Any L- or D-natural amino acid and any non-natural amino acid; see specification as filed for detailed description of substitutions, R-groups and preferred embodiments
  MOD_RES (10)..(11): Any L- or D-natural amino acid and any non-natural amino acid; see specification as filed for detailed description of substitutions, R-groups and preferred embodiments
  MOD_RES (17)..(17): Any L- or D-natural amino acid and any non-natural amino acid; see specification as filed for detailed description of substitutions, R-groups and preferred embodiments
  MOD_RES (18)..(21): Any L- or D-natural or non-natural amino acid, and this range may encompass 1 or 4 residues; see specification as filed for detailed description of substitutions, R-groups and preferred embodiments
  c-term may be amidated

SEQ ID NO: 1344 - protein, 34 aa, Artificial Sequence; identical to SEQ ID NO: 1214
  Description of Artificial Sequence: Synthetic peptide
  MOD_RES (3)..(3): Any L- or D-natural amino acid and any non-natural amino acid; see specification as filed for detailed description of substitutions, R-groups and preferred embodiments
  MOD_RES (10)..(11): Any L- or D-natural amino acid and any non-natural amino acid; see specification as filed for detailed description of substitutions, R-groups and preferred embodiments
  MOD_RES (17)..(17): Any L- or D-natural amino acid and any non-natural amino acid; see specification as filed for detailed description of substitutions, R-groups and preferred embodiments
  MOD_RES (18)..(21): Any L- or D-natural or non-natural amino acid, and this range may encompass 1 or 4 residues; see specification as filed for detailed description of substitutions, R-groups and preferred embodiments
  c-term may be amidated

SEQ ID NO: 1345 - protein, 34 aa, Artificial Sequence; identical to SEQ ID NO: 1215
  Description of Artificial Sequence: Synthetic peptide
  MOD_RES (4)..(4): Any L- or D-natural amino acid and any non-natural amino acid; see specification as filed for detailed description of substitutions, R-groups and preferred embodiments
  MOD_RES (10)..(11): Any L- or D-natural amino acid and any non-natural amino acid; see specification as filed for detailed description of substitutions, R-groups and preferred embodiments
  MOD_RES (17)..(17): Any L- or D-natural amino acid and any non-natural amino acid; see specification as filed for detailed description of substitutions, R-groups and preferred embodiments
  MOD_RES (18)..(21): Any L- or D-natural or non-natural amino acid, and this range may encompass 1 or 4 residues; see specification as filed for detailed description of substitutions, R-groups and preferred embodiments
  c-term may be amidated

SEQ ID NO: 1346 - protein, 34 aa, Artificial Sequence; identical to SEQ ID NO: 1216
  Description of Artificial Sequence: Synthetic peptide
  MOD_RES (5)..(5): Any L- or D-natural amino acid and any non-natural amino acid; see specification as filed for detailed description of substitutions, R-groups and preferred embodiments
  MOD_RES (10)..(11): Any L- or D-natural amino acid and any non-natural amino acid; see specification as filed for detailed description of substitutions, R-groups and preferred embodiments
  MOD_RES (17)..(17): Any L- or D-natural amino acid and any non-natural amino acid; see specification as filed for detailed description of substitutions, R-groups and preferred embodiments
  MOD_RES (18)..(21): Any L- or D-natural or non-natural amino acid, and this range may encompass 1 or 4 residues; see specification as filed for detailed description of substitutions, R-groups and preferred embodiments
  c-term may be amidated

SEQ ID NO: 1347 - protein, 34 aa, Artificial Sequence; identical to SEQ ID NO: 1217
  Description of Artificial Sequence: Synthetic peptide
  MOD_RES (6)..(6): Any L- or D-natural amino acid and any non-natural amino acid; see specification as filed for detailed description of substitutions, R-groups and preferred embodiments
  MOD_RES (10)..(11): Any L- or D-natural amino acid and any non-natural amino acid; see specification as filed for detailed description of substitutions, R-groups and preferred embodiments
  MOD_RES (17)..(17): Any L- or D-natural amino acid and any non-natural amino acid; see specification as filed for detailed description of substitutions, R-groups and preferred embodiments
  MOD_RES (18)..(21): Any L- or D-natural or non-natural amino acid, and this range may encompass 1 or 4 residues; see specification as filed for detailed description of substitutions, R-groups and preferred embodiments
  c-term may be amidated

SEQ ID NO: 1348 - protein, 34 aa, Artificial Sequence; identical to SEQ ID NO: 1218
  Description of Artificial Sequence: Synthetic peptide
  MOD_RES (7)..(7): Any L- or D-natural amino acid and any non-natural amino acid; see specification as filed for detailed description of substitutions, R-groups and preferred embodiments
  MOD_RES (10)..(11): Any L- or D-natural amino acid and any non-natural amino acid; see specification as filed for detailed description of substitutions, R-groups and preferred embodiments
  MOD_RES (17)..(17): Any L- or D-natural amino acid and any non-natural amino acid; see specification as filed for detailed description of substitutions, R-groups and preferred embodiments
  MOD_RES (18)..(21): Any L- or D-natural or non-natural amino acid, and this range may encompass 1 or 4 residues; see specification as filed for detailed description of substitutions, R-groups and preferred embodiments
  c-term may be amidated

SEQ ID NO: 1349 - protein, 34 aa, Artificial Sequence; identical to SEQ ID NO: 1219
  Description of Artificial Sequence: Synthetic peptide
  MOD_RES (8)..(8): Any L- or D-natural amino acid and any non-natural amino acid; see specification as filed for detailed description of substitutions, R-groups and preferred embodiments
  MOD_RES (10)..(11): Any L- or D-natural amino acid and any non-natural amino acid; see specification as filed for detailed description of substitutions, R-groups and preferred embodiments
  MOD_RES (17)..(17): Any L- or D-natural amino acid and any non-natural amino acid; see specification as filed for detailed description of substitutions, R-groups and preferred embodiments
  MOD_RES (18)..(21): Any L- or D-natural or non-natural amino acid, and this range may encompass 1 or 4 residues; see specification as filed for detailed description of substitutions, R-groups and preferred embodiments
  c-term may be amidated

SEQ ID NO: 1350 - protein, 34 aa, Artificial Sequence; identical to SEQ ID NO: 1220
  Description of Artificial Sequence: Synthetic peptide
  MOD_RES (9)..(11): Any L- or D-natural amino acid and any non-natural amino acid; see specification as filed for detailed description of substitutions, R-groups and preferred embodiments
  MOD_RES (17)..(17): Any L- or D-natural amino acid and any non-natural amino acid; see specification as filed for detailed description of substitutions, R-groups and preferred embodiments
  MOD_RES (18)..(21): Any L- or D-natural or non-natural amino acid, and this range may encompass 1 or 4 residues; see specification as filed for detailed description of substitutions, R-groups and preferred embodiments
  c-term may be amidated

SEQ ID NO: 1351 - protein, 35 aa, Artificial Sequence
  Description of Artificial Sequence: Synthetic peptide
  c-term may be amidated
QPDAINAPVTCCYNFTNRKISVQRLASYRRITSSK

SEQ ID NO: 1352 - protein, 35 aa, Artificial Sequence
  Description of Artificial Sequence: Synthetic peptide
  MOD_RES (11)..(12): Any L- or D-natural amino acid and any non-natural amino acid; see specification as filed for detailed description of substitutions, R-groups and preferred embodiments
  c-term may be amidated
QPDAINAPVTXXYNFTNRKISVQRLASYRRITSSK

SEQ ID NO: 1353 - protein, 35 aa, Artificial Sequence
  Description of Artificial Sequence: Synthetic peptide
  MOD_RES (1)..(1): Any L- or D-natural amino acid and any non-natural amino acid; see specification as filed for detailed description of substitutions, R-groups and preferred embodiments
  MOD_RES (11)..(12): Any L- or D-natural amino acid and any non-natural amino acid; see specification as filed for detailed description of substitutions, R-groups and preferred embodiments
  c-term may be amidated
XPDAINAPVTXXYNFTNRKISVQRLASYRRITSSK

SEQ ID NO: 1354 - protein, 35 aa, Artificial Sequence
  Description of Artificial Sequence: Synthetic peptide
  MOD_RES (2)..(2): Any L- or D-natural amino acid and any non-natural amino acid; see specification as filed for detailed description of substitutions, R-groups and preferred embodiments
  MOD_RES (11)..(12): Any L- or D-natural amino acid and any non-natural amino acid; see specification as filed for detailed description of substitutions, R-groups and preferred embodiments
  c-term may be amidated
QXDAINAPVTXXYNFTNRKISVQRLASYRRITSSK

SEQ ID NO: 1355 - protein, 35 aa, Artificial Sequence
  Description of Artificial Sequence: Synthetic peptide
  MOD_RES (3)..(3): Any L- or D-natural amino acid and any non-natural amino acid; see specification as filed for detailed description of substitutions, R-groups and preferred embodiments
  MOD_RES (11)..(12): Any L- or D-natural amino acid and any non-natural amino acid; see specification as filed for detailed description of substitutions, R-groups and preferred embodiments
  c-term may be amidated
QPXAINAPVTXXYNFTNRKISVQRLASYRRITSSK

SEQ ID NO: 1356 - protein, 35 aa, Artificial Sequence
  Description of Artificial Sequence: Synthetic peptide
  MOD_RES (4)..(4): Any L- or D-natural amino acid and any non-natural amino acid; see specification as filed for detailed description of substitutions, R-groups and preferred embodiments
  MOD_RES (11)..(12): Any L- or D-natural amino acid and any non-natural amino acid; see specification as filed for detailed description of substitutions, R-groups and preferred embodiments
  c-term may be amidated
QPDXINAPVTXXYNFTNRKISVQRLASYRRITSSK

SEQ ID NO: 1357 - protein, 35 aa, Artificial Sequence
  Description of Artificial Sequence: Synthetic peptide
  MOD_RES (5)..(5): Any L- or D-natural amino acid and any non-natural amino acid; see specification as filed for detailed description of substitutions, R-groups and preferred embodiments
  MOD_RES (11)..(12): Any L- or D-natural amino acid and any non-natural amino acid; see specification as filed for detailed description of substitutions, R-groups and preferred embodiments
  c-term may be amidated
QPDAXNAPVTXXYNFTNRKISVQRLASYRRITSSK

SEQ ID NO: 1358 - protein, 35 aa, Artificial Sequence
  Description of Artificial Sequence: Synthetic peptide
  MOD_RES (6)..(6): Any L- or D-natural amino acid and any non-natural amino acid; see specification as filed for detailed description of substitutions, R-groups and preferred embodiments
  MOD_RES (11)..(12): Any L- or D-natural amino acid and any non-natural amino acid; see specification as filed for detailed description of substitutions, R-groups and preferred embodiments
  c-term may be amidated
QPDAIXAPVTXXYNFTNRKISVQRLASYRRITSSK

SEQ ID NO: 1359 - protein, 35 aa, Artificial Sequence
  Description of Artificial Sequence: Synthetic peptide
  MOD_RES (7)..(7): Any L- or D-natural amino acid and any non-natural amino acid; see specification as filed for detailed description of substitutions, R-groups and preferred embodiments
  MOD_RES (11)..(12): Any L- or D-natural amino acid and any non-natural amino acid; see specification as filed for detailed description of substitutions, R-groups and preferred embodiments
  c-term may be amidated
QPDAINXPVTXXYNFTNRKISVQRLASYRRITSSK

SEQ ID NO: 1360 - protein, 35 aa, Artificial Sequence
  Description of Artificial Sequence: Synthetic peptide
  MOD_RES (8)..(8): Any L- or D-natural amino acid and any non-natural amino acid; see specification as filed for detailed description of substitutions, R-groups and preferred embodiments
  MOD_RES (11)..(12): Any L- or D-natural amino acid and any non-natural amino acid; see specification as filed for detailed description of substitutions, R-groups and preferred embodiments
  c-term may be amidated
QPDAINAXVTXXYNFTNRKISVQRLASYRRITSSK

SEQ ID NO: 1361 - protein, 35 aa, Artificial Sequence
  Description of Artificial Sequence: Synthetic peptide
  MOD_RES (9)..(9): Any L- or D-natural amino acid and any non-natural amino acid; see specification as filed for detailed description of substitutions, R-groups and preferred embodiments
  MOD_RES (11)..(12): Any L- or D-natural amino acid and any non-natural amino acid; see specification as filed for detailed description of substitutions, R-groups and preferred embodiments
  c-term may be amidated
QPDAINAPXTXXYNFTNRKISVQRLASYRRITSSK

SEQ ID NO: 1362 - protein, 35 aa, Artificial Sequence
  Description of Artificial Sequence: Synthetic peptide
  MOD_RES (10)..(12): Any L- or D-natural amino acid and any non-natural amino acid; see specification as filed for detailed description of substitutions, R-groups and preferred embodiments
  c-term may be amidated
QPDAINAPVXXXYNFTNRKISVQRLASYRRITSSK

SEQ ID NO: 1363 - protein, 35 aa, Artificial Sequence
  Description of Artificial Sequence: Synthetic peptide
  c-term may be amidated
QPDAINAPVTCCENFTNRKISVQRLASYRRITSSK

SEQ ID NO: 1364 - protein, 35 aa, Artificial Sequence
  Description of Artificial Sequence: Synthetic peptide
  MOD_RES (11)..(12): Any L- or D-natural amino acid and any non-natural amino acid; see specification as filed for detailed description of substitutions, R-groups and preferred embodiments
  c-term may be amidated
QPDAINAPVTXXENFTNRKISVQRLASYRRITSSK

SEQ ID NO: 1365 - protein, 35 aa, Artificial Sequence
  Description of Artificial Sequence: Synthetic peptide
  MOD_RES (1)..(1): Any L- or D-natural amino acid and any non-natural amino acid; see specification as filed for detailed description of substitutions, R-groups and preferred embodiments
  MOD_RES (11)..(12): Any L- or D-natural amino acid and any non-natural amino acid; see specification as filed for detailed description of substitutions, R-groups and preferred embodiments
  c-term may be amidated
XPDAINAPVTXXENFTNRKISVQRLASYRRITSSK

SEQ ID NO: 1366 - protein, 35 aa, Artificial Sequence
  Description of Artificial Sequence: Synthetic peptide
  MOD_RES (2)..(2): Any L- or D-natural amino acid and any non-natural amino acid; see specification as filed for detailed description of substitutions, R-groups and preferred embodiments
  MOD_RES (11)..(12): Any L- or D-natural amino acid and any non-natural amino acid; see specification as filed for detailed description of substitutions, R-groups and preferred embodiments
  c-term may be amidated
QXDAINAPVTXXENFTNRKISVQRLASYRRITSSK

SEQ ID NO: 1367 - protein, 35 aa, Artificial Sequence
  Description of Artificial Sequence: Synthetic peptide
  MOD_RES (3)..(3): Any L- or D-natural amino acid and any non-natural amino acid; see specification as filed for detailed description of substitutions, R-groups and preferred embodiments
  MOD_RES (11)..(12): Any L- or D-natural amino acid and any non-natural amino acid; see specification as filed for detailed description of substitutions, R-groups and preferred embodiments
  c-term may be amidated
QPXAINAPVTXXENFTNRKISVQRLASYRRITSSK

SEQ ID NO: 1368 - protein, 35 aa, Artificial Sequence
  Description of Artificial Sequence: Synthetic peptide
  MOD_RES (4)..(4): Any L- or D-natural amino acid and any non-natural amino acid; see specification as filed for detailed description of substitutions, R-groups and preferred embodiments
  MOD_RES (11)..(12): Any L- or D-natural amino acid and any non-natural amino acid; see specification as filed for detailed description of substitutions, R-groups and preferred embodiments
  c-term may be amidated
QPDXINAPVTXXENFTNRKISVQRLASYRRITSSK

SEQ ID NO: 1369 - protein, 35 aa, Artificial Sequence
  Description of Artificial Sequence: Synthetic peptide
  MOD_RES (5)..(5): Any L- or D-natural amino acid and any non-natural amino acid; see specification as filed for detailed description of substitutions, R-groups and preferred embodiments
  MOD_RES (11)..(12): Any L- or D-natural amino acid and any non-natural amino acid; see specification as filed for detailed description of substitutions, R-groups and preferred embodiments
  c-term may be amidated
QPDAXNAPVTXXENFTNRKISVQRLASYRRITSSK

SEQ ID NO: 1370 - protein, 35 aa, Artificial Sequence
  Description of Artificial Sequence: Synthetic peptide
  MOD_RES (6)..(6): Any L- or D-natural amino acid and any non-natural amino acid; see specification as filed for detailed description of substitutions, R-groups and preferred embodiments
  MOD_RES (11)..(12): Any L- or D-natural amino acid and any non-natural amino acid; see specification as filed for detailed description of substitutions, R-groups and preferred embodiments
  c-term may be amidated
QPDAIXAPVTXXENFTNRKISVQRLASYRRITSSK

SEQ ID NO: 1371 - protein, 35 aa, Artificial Sequence
  Description of Artificial Sequence: Synthetic peptide
  MOD_RES (7)..(7): Any L- or D-natural amino acid and any non-natural amino acid; see specification as filed for detailed description of substitutions, R-groups and preferred embodiments
  MOD_RES (11)..(12): Any L- or D-natural amino acid and any non-natural amino acid; see specification as filed for detailed description of substitutions, R-groups and preferred embodiments
  c-term may be amidated
QPDAINXPVTXXENFTNRKISVQRLASYRRITSSK

SEQ ID NO: 1372 - protein, 35 aa, Artificial Sequence
  Description of Artificial Sequence: Synthetic peptide
  MOD_RES (8)..(8): Any L- or D-natural amino acid and any non-natural amino acid; see specification as filed for detailed description of substitutions, R-groups and preferred embodiments
  MOD_RES (11)..(12): Any L- or D-natural amino acid and any non-natural amino acid; see specification as filed for detailed description of substitutions, R-groups and preferred embodiments
  c-term may be amidated
QPDAINAXVTXXENFTNRKISVQRLASYRRITSSK

SEQ ID NO: 1373 - protein, 35 aa, Artificial Sequence
  Description of Artificial Sequence: Synthetic peptide
  MOD_RES (9)..(9): Any L- or D-natural amino acid and any non-natural amino acid; see specification as filed for detailed description of substitutions, R-groups and preferred embodiments
  MOD_RES (11)..(12): Any L- or D-natural amino acid and any non-natural amino acid; see specification as filed for detailed description of substitutions, R-groups and preferred embodiments
  c-term may be amidated
QPDAINAPXTXXENFTNRKISVQRLASYRRITSSK

SEQ ID NO: 1374 - protein, 35 aa, Artificial Sequence
  Description of Artificial Sequence: Synthetic peptide
  MOD_RES (10)..(12): Any L- or D-natural amino acid and any non-natural amino acid; see specification as filed for detailed description of substitutions, R-groups and preferred embodiments
  c-term may be amidated
QPDAINAPVXXXENFTNRKISVQRLASYRRITSSK

SEQ ID NO: 1375 - protein, 26 aa, Artificial Sequence
  Description of Artificial Sequence: Synthetic peptide
  MOD_RES (3)..(3): Any L- or D-natural amino acid and any non-natural amino acid; see specification as filed for detailed description of substitutions, R-groups and preferred embodiments
  c-term may be amidated
AKXNFTNRKISVQRLASYRRITSSKE

SEQ ID NO: 1376 - protein, 15 aa, Artificial Sequence
  Description of Artificial Sequence: Synthetic peptide
  c-term may be amidated
PKEAVIFKTIVAKEI

SEQ ID NO: 1377 - protein, 19 aa, Artificial Sequence
  Description of Artificial Sequence: Synthetic peptide
  c-term may be amidated
ADPKQKWVQDSMDHLDKQT

SEQ ID NO: 1378 - protein, 41 aa, Artificial Sequence
  Description of Artificial Sequence: Synthetic peptide
  MOD_RES (24)..(27): Any L- or D-natural or non-natural amino acid, and this range may encompass 1 or 4 residues; see specification as filed for detailed description of substitutions, R-groups and preferred embodiments
  c-term may be amidated
YNFTNRKISVQRLASYRRITSSKXXXXKWVQDSMDHLDKQT

SEQ ID NO: 1379 - protein, 32 aa, Artificial Sequence
  Description of Artificial Sequence: Synthetic peptide
  MOD_RES (15)..(18): Any L- or D-natural or non-natural amino acid, and this range may encompass 1 or 4 residues; see specification as filed for detailed description of substitutions, R-groups and preferred embodiments
  c-term may be amidated
QPDAINAPVTCCYNXXXXKWVQDSMDHLDKQT

SEQ ID NO: 1380 - protein, 32 aa, Artificial Sequence
  Description of Artificial Sequence: Synthetic peptide
  MOD_RES (11)..(12): Any L- or D-natural amino acid and any non-natural amino acid; see specification as filed for detailed description of substitutions, R-groups and preferred embodiments
  MOD_RES (15)..(18): Any L- or D-natural or non-natural amino acid, and this range may encompass 1 or 4 residues; see specification as filed for detailed description of substitutions, R-groups and preferred embodiments
  c-term may be amidated
QPDAINAPVTXXYNXXXXKWVQDSMDHLDKQT

SEQ ID NO: 1381 - protein, 32 aa, Artificial Sequence
  Description of Artificial Sequence: Synthetic peptide
  MOD_RES (1)..(1): Any L- or D-natural amino acid and any non-natural amino acid; see specification as filed for detailed description of substitutions, R-groups and preferred embodiments
  MOD_RES (11)..(12): Any L- or D-natural amino acid and any non-natural amino acid; see specification as filed for detailed description of substitutions, R-groups and preferred embodiments
  MOD_RES (15)..(18): Any L- or D-natural or non-natural amino acid, and this range may encompass 1 or 4 residues; see specification as filed for detailed description of substitutions, R-groups and preferred embodiments
  c-term may be amidated
XPDAINAPVTXXYNXXXXKWVQDSMDHLDKQT

SEQ ID NO: 1382 - protein, 32 aa, Artificial Sequence
  Description of Artificial Sequence: Synthetic peptide
  MOD_RES (2)..(2): Any L- or D-natural amino acid and any non-natural amino acid; see specification as filed for detailed description of substitutions, R-groups and preferred embodiments
  MOD_RES (11)..(12): Any L- or D-natural amino acid and any non-natural amino acid; see specification as filed for detailed description of substitutions, R-groups and preferred embodiments
  MOD_RES (15)..(18): Any L- or D-natural or non-natural amino acid, and this range may encompass 1 or 4 residues; see specification as filed for detailed description of substitutions, R-groups and preferred embodiments
  c-term may be amidated
QXDAINAPVTXXYNXXXXKWVQDSMDHLDKQT

SEQ ID NO: 1383 - protein, 32 aa, Artificial Sequence
  Description of Artificial Sequence: Synthetic peptide
  MOD_RES (3)..(3): Any L- or D-natural amino acid and any non-natural amino acid; see specification as filed for detailed description of substitutions, R-groups and preferred embodiments
  MOD_RES (11)..(12): Any L- or D-natural amino acid and any non-natural amino acid; see specification as filed for detailed description of substitutions, R-groups and preferred embodiments
  MOD_RES (15)..(18): Any L- or D-natural or non-natural amino acid, and this range may encompass 1 or 4 residues; see specification as filed for detailed description of substitutions, R-groups and preferred embodiments
  c-term may be amidated
QPXAINAPVTXXYNXXXXKWVQDSMDHLDKQT

SEQ ID NO: 1384 - protein, 32 aa, Artificial Sequence
  Description of Artificial Sequence: Synthetic peptide
  MOD_RES (4)..(4): Any L- or D-natural amino acid and any non-natural amino acid; see specification as filed for detailed description of substitutions, R-groups and preferred embodiments
  MOD_RES (11)..(12): Any L- or D-natural amino acid and any non-natural amino acid; see specification as filed for detailed description of substitutions, R-groups and preferred embodiments
  MOD_RES (15)..(18): Any L- or D-natural or non-natural amino acid, and this range may encompass 1 or 4 residues; see specification as filed for detailed description of substitutions, R-groups and preferred embodiments
  c-term may be amidated
QPDXINAPVTXXYNXXXXKWVQDSMDHLDKQT

SEQ ID NO: 1385 - protein, 32 aa, Artificial Sequence
  Description of Artificial Sequence: Synthetic peptide
  MOD_RES (5)..(5): Any L- or D-natural amino acid and any non-natural amino acid; see specification as filed for detailed description of substitutions, R-groups and preferred embodiments
  MOD_RES (11)..(12): Any L- or D-natural amino acid and any non-natural amino acid; see specification as filed for detailed description of substitutions, R-groups and preferred embodiments
  MOD_RES (15)..(18): Any L- or D-natural or non-natural amino acid, and this range may encompass 1 or 4 residues; see specification as filed for detailed description of substitutions, R-groups and preferred embodiments
  c-term may be amidated
QPDAXNAPVTXXYNXXXXKWVQDSMDHLDKQT

SEQ ID NO: 1386 - protein, 32 aa, Artificial Sequence
  Description of Artificial Sequence: Synthetic peptide
  MOD_RES (6)..(6): Any L- or D-natural amino acid and any non-natural amino acid; see specification as filed for detailed description of substitutions, R-groups and preferred embodiments
  MOD_RES (11)..(12): Any L- or D-natural amino acid and any non-natural amino acid; see specification as filed for detailed description of substitutions, R-groups and preferred embodiments
  MOD_RES (15)..(18): Any L- or D-natural or non-natural amino acid, and this range may encompass 1 or 4 residues; see specification as filed for detailed description of substitutions, R-groups and preferred embodiments
  c-term may be amidated
QPDAIXAPVTXXYNXXXXKWVQDSMDHLDKQT

SEQ ID NO: 1387 - protein, 32 aa, Artificial Sequence
  Description of Artificial Sequence: Synthetic peptide
  MOD_RES (7)..(7): Any L- or D-natural amino acid and any non-natural amino acid; see specification as filed for detailed description of substitutions, R-groups and preferred embodiments
  MOD_RES (11)..(12): Any L- or D-natural amino acid and any non-natural amino acid; see specification as filed for detailed description of substitutions, R-groups and preferred embodiments
  MOD_RES (15)..(18): Any L- or D-natural or non-natural amino acid, and this range may encompass 1 or 4 residues; see specification as filed for detailed description of substitutions, R-groups and preferred embodiments
  c-term may be amidated
QPDAINXPVTXXYNXXXXKWVQDSMDHLDKQT

SEQ ID NO: 1388 - protein, 32 aa, Artificial Sequence
  Description of Artificial Sequence: Synthetic peptide
  MOD_RES (8)..(8): Any L- or D-natural amino acid and any non-natural amino acid; see specification as filed for detailed description of substitutions, R-groups and preferred embodiments
  MOD_RES (11)..(12): Any L- or D-natural amino acid and any non-natural amino acid; see specification as filed for detailed description of substitutions, R-groups and preferred embodiments
  MOD_RES (15)..(18): Any L- or D-natural or non-natural amino acid, and this range may encompass 1 or 4 residues; see specification as filed for detailed description of substitutions, R-groups and preferred embodiments
  c-term may be amidated
QPDAINAXVTXXYNXXXXKWVQDSMDHLDKQT

SEQ ID NO: 1389 - protein, 32 aa, Artificial Sequence
  Description of Artificial Sequence: Synthetic peptide
  MOD_RES (9)..(9): Any L- or D-natural amino acid and any non-natural amino acid; see specification as filed for detailed description of substitutions, R-groups and preferred embodiments
  MOD_RES (11)..(12): Any L- or D-natural amino acid and any non-natural amino acid; see specification as filed for detailed description of substitutions, R-groups and preferred embodiments
  MOD_RES (15)..(18): Any L- or D-natural or non-natural amino acid, and this range may encompass 1 or 4 residues; see specification as filed for detailed description of substitutions, R-groups and preferred embodiments
  c-term may be amidated
QPDAINAPXTXXYNXXXXKWVQDSMDHLDKQT

SEQ ID NO: 1390 - protein, 32 aa, Artificial Sequence
  Description of Artificial Sequence: Synthetic peptide
  MOD_RES (10)..(12): Any L- or D-natural amino acid and any non-natural amino acid; see specification as filed for detailed description of substitutions, R-groups and preferred embodiments
  MOD_RES (15)..(18): Any L- or D-natural or non-natural amino acid, and this range may encompass 1 or 4 residues; see specification as filed for detailed description of substitutions, R-groups and preferred embodiments
  c-term may be amidated
QPDAINAPVXXXYNXXXXKWVQDSMDHLDKQT

SEQ ID NO: 1391 - protein, 32 aa, Artificial Sequence
  Description of Artificial Sequence: Synthetic peptide
  MOD_RES (1)..(1): Any L- or D-natural amino acid and any non-natural amino acid; see specification as filed for detailed description of substitutions, R-groups and preferred embodiments
  MOD_RES (11)..(13): Any L- or D-natural amino acid and any non-natural amino acid; see specification as filed for detailed description of substitutions, R-groups and preferred embodiments
  MOD_RES (15)..(18): Any L- or D-natural or non-natural amino acid, and this range may encompass 1 or 4 residues; see specification as filed for detailed description of substitutions, R-groups and preferred embodiments
  c-term may be amidated
XPDAINAPVTXXXNXXXXKWVQDSMDHLDKQT

SEQ ID NO: 1392 - protein, 32 aa, Artificial Sequence
  Description of Artificial Sequence: Synthetic peptide
  MOD_RES (2)..(2): Any L- or D-natural amino acid and any non-natural amino acid; see specification as filed for detailed description of substitutions, R-groups and preferred embodiments
  MOD_RES (11)..(13): Any L- or D-natural amino acid and any non-natural amino acid; see specification as filed for detailed description of substitutions, R-groups and preferred embodiments
  MOD_RES (15)..(18): Any L- or D-natural or non-natural amino acid, and this range may encompass 1 or 4 residues; see specification as filed for detailed description of substitutions, R-groups and preferred embodiments
  c-term may be amidated
QXDAINAPVTXXXNXXXXKWVQDSMDHLDKQT

SEQ ID NO: 1393 - protein, 32 aa, Artificial Sequence
  Description of Artificial Sequence: Synthetic peptide
  MOD_RES (3)..(3): Any L- or D-natural amino acid and any non-natural amino acid; see specification as filed for detailed description of substitutions, R-groups and preferred embodiments
  MOD_RES (11)..(13): Any L- or D-natural amino acid and any non-natural amino acid; see specification as filed for detailed description of substitutions, R-groups and preferred embodiments
  MOD_RES (15)..(18): Any L- or D-natural or non-natural amino acid, and this range may encompass 1 or 4 residues; see specification as filed for detailed description of substitutions, R-groups and preferred embodiments
  c-term may be amidated
QPXAINAPVTXXXNXXXXKWVQDSMDHLDKQT

SEQ ID NO: 1394 - protein, 32 aa, Artificial Sequence
  Description of Artificial Sequence: Synthetic peptide
  MOD_RES (4)..(4): Any L- or D-natural amino acid and any non-natural amino acid; see specification as filed for detailed description of substitutions, R-groups and preferred embodiments
  MOD_RES (11)..(13): Any L- or D-natural amino acid and any non-natural amino acid; see specification as filed for detailed description of substitutions, R-groups and preferred embodiments
  MOD_RES (15)..(18): Any L- or D-natural or non-natural amino acid, and this range may encompass 1 or 4 residues; see specification as filed for detailed description of substitutions, R-groups and preferred embodiments
  c-term may be amidated
QPDXINAPVTXXXNXXXXKWVQDSMDHLDKQT

SEQ ID NO: 1395 - protein, 32 aa, Artificial Sequence
  Description of Artificial Sequence: Synthetic peptide
  MOD_RES (5)..(5): Any L- or D-natural amino acid and any non-natural amino acid; see specification as filed for detailed description of substitutions, R-groups and preferred embodiments
  MOD_RES (11)..(13): Any L- or D-natural amino acid and any non-natural amino acid; see specification as filed for detailed description of substitutions, R-groups and preferred embodiments
  MOD_RES (15)..(18): Any L- or D-natural or non-natural amino acid, and this range may encompass 1 or 4 residues; see specification as filed for detailed description of substitutions, R-groups and preferred embodiments
  c-term may be amidated
QPDAXNAPVTXXXNXXXXKWVQDSMDHLDKQT

SEQ ID NO: 1396 - protein, 32 aa, Artificial Sequence
  Description of Artificial Sequence: Synthetic peptide
  MOD_RES (6)..(6): Any L- or D-natural amino acid and any non-natural amino acid; see specification as filed for detailed description of substitutions, R-groups and preferred embodiments
  MOD_RES (11)..(13): Any L- or D-natural amino acid and any non-natural amino acid; see specification as filed for detailed description of substitutions, R-groups and preferred embodiments
  MOD_RES (15)..(18): Any L- or D-natural or non-natural amino acid, and this range may encompass 1 or 4 residues; see specification as filed for detailed description of substitutions, R-groups and preferred embodiments
  c-term may be amidated
QPDAIXAPVTXXXNXXXXKWVQDSMDHLDKQT

SEQ ID NO: 1397 - protein, 32 aa, Artificial Sequence
  Description of Artificial Sequence: Synthetic peptide
  MOD_RES (7)..(7): Any L- or D-natural amino acid and any non-natural amino acid; see specification as filed for detailed description of substitutions, R-groups and preferred embodiments
  MOD_RES (11)..(13): Any L- or D-natural amino acid and any non-natural amino acid; see specification as filed for detailed description of substitutions, R-groups and preferred embodiments
  MOD_RES (15)..(18): Any L- or D-natural or non-natural amino acid, and this range may encompass 1 or 4 residues; see specification as filed for detailed description of substitutions, R-groups and preferred embodiments
  c-term may be amidated
QPDAINXPVTXXXNXXXXKWVQDSMDHLDKQT

SEQ ID NO: 1398 - protein, 32 aa, Artificial Sequence
  Description of Artificial Sequence: Synthetic peptide
  MOD_RES (8)..(8): Any L- or D-natural amino acid and any non-natural amino acid; see specification as filed for detailed description of substitutions, R-groups and preferred embodiments
  MOD_RES (11)..(13): Any L- or D-natural amino acid and any non-natural amino acid; see specification as filed for detailed description of substitutions, R-groups and preferred embodiments
  MOD_RES (15)..(18): Any L- or D-natural or non-natural amino acid, and this range may encompass 1 or 4 residues; see specification as filed for detailed description of substitutions, R-groups and preferred embodiments
  c-term may be amidated
QPDAINAXVTXXXNXXXXKWVQDSMDHLDKQT

SEQ ID NO: 1399 - protein, 32 aa, Artificial Sequence
  Description of Artificial Sequence: Synthetic peptide
  MOD_RES (9)..(9): Any L- or D-natural amino acid and any non-natural amino acid; see specification as filed for detailed description of substitutions, R-groups and preferred embodiments
  MOD_RES (11)..(13): Any L- or D-natural amino acid and any non-natural amino acid; see specification as filed for detailed description of substitutions, R-groups and preferred embodiments
  MOD_RES (15)..(18): Any L- or D-natural or non-natural amino acid, and this range may encompass 1 or 4 residues; see specification as filed for detailed description of substitutions, R-groups and preferred embodiments
  c-term may be amidated
QPDAINAPXTXXXNXXXXKWVQDSMDHLDKQT

SEQ ID NO: 1400 - protein, 32 aa, Artificial Sequence
  Description of Artificial Sequence: Synthetic peptide
  MOD_RES (10)..(13): Any L- or D-natural amino acid and any non-natural amino acid; see specification as filed for detailed description of substitutions, R-groups and preferred embodiments
  MOD_RES (15)..(18): Any L- or D-natural or non-natural amino acid, and this range may encompass 1 or 4 residues; see specification as filed for detailed description of substitutions, R-groups and preferred embodiments
  c-term may be amidated
QPDAINAPVXXXXNXXXXKWVQDSMDHLDKQT

SEQ ID NO: 1401 - protein, 32 aa, Artificial Sequence
  Description of Artificial Sequence: Synthetic peptide
  MOD_RES (1)..(1): Any L- or D-natural amino acid and any non-natural amino acid; see specification as filed for detailed description of substitutions, R-groups and preferred embodiments
  MOD_RES (11)..(12): Any L- or D-natural amino acid and any non-natural amino acid; see specification as filed for detailed description of substitutions, R-groups and preferred embodiments
  MOD_RES (14)..(14): Any L- or D-natural amino acid and any non-natural amino acid; see specification as filed for detailed description of substitutions, R-groups and preferred embodiments
  MOD_RES (15)..(18): Any L- or D-natural or non-natural amino acid, and this range may encompass 1 or 4 residues; see specification as filed for detailed description of substitutions, R-groups and preferred embodiments
  c-term may be amidated
XPDAINAPVTXXYXXXXXKWVQDSMDHLDKQT

SEQ ID NO: 1402 - protein, 32 aa, Artificial Sequence
  Description of Artificial Sequence: Synthetic peptide
  MOD_RES (2)..(2): Any L- or D-natural amino acid and any non-natural amino acid; see specification as filed for detailed description of substitutions, R-groups and preferred embodiments
  MOD_RES (11)..(12): Any L- or D-natural amino acid and any non-natural amino acid; see specification as filed for detailed description of substitutions, R-groups and preferred embodiments
  MOD_RES (14)..(14): Any L- or D-natural amino acid and any non-natural amino acid; see specification as filed for detailed description of substitutions, R-groups and preferred embodiments
  MOD_RES (15)..(18): Any L- or D-natural or non-natural amino acid, and this range may encompass 1 or 4 residues; see specification as filed for detailed description of substitutions, R-groups and preferred embodiments
  c-term may be amidated
QXDAINAPVTXXYXXXXXKWVQDSMDHLDKQT

SEQ ID NO: 1403 - protein, 32 aa, Artificial Sequence
  Description of Artificial Sequence: Synthetic peptide
  MOD_RES (3)..(3): Any L- or D-natural amino acid and any non-natural amino acid; see specification as filed for detailed description of substitutions, R-groups and preferred embodiments
  MOD_RES (11)..(12): Any L- or D-natural amino acid and any non-natural amino acid; see specification as filed for detailed description of substitutions, R-groups and preferred embodiments
  MOD_RES (14)..(14): Any L- or D-natural amino acid and any non-natural amino acid; see specification as filed for detailed description of substitutions, R-groups and preferred embodiments
  MOD_RES (15)..(18): Any L- or D-natural or non-natural amino acid, and this range may encompass 1 or 4 residues; see specification as filed for detailed description of substitutions, R-groups and preferred embodiments
  c-term may be amidated
QPXAINAPVTXXYXXXXXKWVQDSMDHLDKQT

SEQ ID NO: 1404 - protein, 32 aa, Artificial Sequence
  Description of Artificial Sequence: Synthetic peptide
  MOD_RES (4)..(4): Any L- or D-natural amino acid and any non-natural amino acid; see specification as filed for detailed description of substitutions, R-groups and preferred embodiments
  MOD_RES (11)..(12): Any L- or D-natural amino acid and any non-natural amino acid; see specification as filed for detailed description of substitutions, R-groups and preferred embodiments
  MOD_RES (14)..(14): Any L- or D-natural amino acid and any non-natural amino acid; see specification as filed for detailed description of substitutions, R-groups and preferred embodiments
  MOD_RES (15)..(18): Any L- or D-natural or non-natural amino acid, and this range may encompass 1 or 4 residues; see specification as filed for detailed description of substitutions, R-groups and preferred embodiments
  c-term may be amidated
QPDXINAPVTXXYXXXXXKWVQDSMDHLDKQT

SEQ ID NO: 1405 - protein, 32 aa, Artificial Sequence
  Description of Artificial Sequence: Synthetic peptide
  MOD_RES (5)..(5): Any L- or D-natural amino acid and any non-natural amino acid; see specification as filed for detailed description of substitutions, R-groups and preferred embodiments
  MOD_RES (11)..(12): Any L- or D-natural amino acid and any non-natural amino acid; see specification as filed for detailed description of substitutions, R-groups and preferred embodiments
  MOD_RES (14)..(14): Any L- or D-natural amino acid and any non-natural amino acid; see specification as filed for detailed description of substitutions, R-groups and preferred embodiments
  MOD_RES (15)..(18): Any L- or D-natural or non-natural amino acid, and this range may encompass 1 or 4 residues; see specification as filed for detailed description of substitutions, R-groups and preferred embodiments
  c-term may be amidated
QPDAXNAPVTXXYXXXXXKWVQDSMDHLDKQT

SEQ ID NO: 1406 - protein, 32 aa, Artificial Sequence
  Description of Artificial Sequence: Synthetic peptide
  MOD_RES (6)..(6): Any L- or D-natural amino acid and any non-natural amino acid; see specification as filed for detailed description of substitutions, R-groups and preferred embodiments
  MOD_RES (11)..(12): Any L- or D-natural amino acid and any non-natural amino acid; see specification as filed for detailed description of substitutions, R-groups and preferred embodiments
  MOD_RES (14)..(14): Any L- or D-natural amino acid and any non-natural amino acid; see specification as filed for detailed description of substitutions, R-groups and preferred embodiments
  MOD_RES (15)..(18): Any L- or D-natural or non-natural amino acid, and this range may encompass 1 or 4 residues; see specification as filed for detailed description of substitutions, R-groups and preferred embodiments
  c-term may be amidated
QPDAIXAPVTXXYXXXXXKWVQDSMDHLDKQT

SEQ ID NO: 1407 - protein, 32 aa, Artificial Sequence
  Description of Artificial Sequence: Synthetic peptide
  MOD_RES (7)..(7): Any L- or D-natural amino acid and any non-natural amino acid; see specification as filed for detailed description of substitutions, R-groups and preferred embodiments
  MOD_RES (11)..(12): Any L- or D-natural amino acid and any non-natural amino acid; see specification as filed for detailed description of substitutions, R-groups and preferred embodiments
  MOD_RES (14)..(14): Any L- or D-natural amino acid and any non-natural amino acid; see specification as filed for detailed description of substitutions, R-groups and preferred embodiments
  MOD_RES (15)..(18): Any L- or D-natural or non-natural amino acid, and this range may encompass 1 or 4 residues; see specification as filed for detailed description of substitutions, R-groups and preferred embodiments
  c-term may be amidated
QPDAINXPVTXXYXXXXXKWVQDSMDHLDKQT

SEQ ID NO: 1408 - protein, 32 aa, Artificial Sequence
  Description of Artificial Sequence: Synthetic peptide
  MOD_RES (8)..(8): Any L- or D-natural amino acid and any non-natural amino acid; see specification as filed for detailed description of substitutions, R-groups and preferred embodiments
  MOD_RES (11)..(12): Any L- or D-natural amino acid and any non-natural amino acid; see specification as filed for detailed description of substitutions, R-groups and preferred embodiments
  MOD_RES (14)..(14): Any L- or D-natural amino acid and any non-natural amino acid; see specification as filed for detailed description of substitutions, R-groups and preferred embodiments
  MOD_RES (15)..(18): Any L- or D-natural or non-natural amino acid, and this range may encompass 1 or 4 residues; see specification as filed for detailed description of substitutions, R-groups and preferred embodiments
  c-term may be amidated
QPDAINAXVTXXYXXXXXKWVQDSMDHLDKQT

SEQ ID NO: 1409 - protein, 32 aa, Artificial Sequence
  Description of Artificial Sequence: Synthetic peptide
  MOD_RES (9)..(9): Any L- or D-natural amino acid and any non-natural amino acid; see specification as filed for detailed description of substitutions, R-groups and preferred embodiments
  MOD_RES (11)..(12): Any L- or D-natural amino acid and any non-natural amino acid; see specification as filed for detailed description of substitutions, R-groups and preferred embodiments
  MOD_RES (14)..(14): Any L- or D-natural amino acid and any non-natural amino acid; see specification as filed for detailed description of substitutions, R-groups and preferred embodiments
  MOD_RES (15)..(18): Any L- or D-natural or non-natural amino acid, and this range may encompass 1 or 4 residues; see specification as filed for detailed description of substitutions, R-groups and preferred embodiments
  c-term may be amidated
QPDAINAPXTXXYXXXXXKWVQDSMDHLDKQT

SEQ ID NO: 1410 - protein, 32 aa, Artificial Sequence
  Description of Artificial Sequence: Synthetic peptide
  MOD_RES (10)..(12): Any L- or D-natural amino acid and any non-natural amino acid; see specification as filed for detailed description of substitutions, R-groups and preferred embodiments
  MOD_RES (14)..(14): Any L- or D-natural amino acid and any non-natural amino acid; see specification as filed for detailed description of substitutions, R-groups and preferred embodiments
  MOD_RES (15)..(18): Any L- or D-natural or non-natural amino acid, and this range may encompass 1 or 4 residues; see specification as filed for detailed description of substitutions, R-groups and preferred embodiments
  c-term may be amidated
QPDAINAPVXXXYXXXXXKWVQDSMDHLDKQT

SEQ ID NO: 1411 - protein, 26 aa, Artificial Sequence
  Description of Artificial Sequence: Synthetic peptide
  MOD_RES (3)..(3): Any L- or D-natural amino acid and any non-natural amino acid; see specification as filed for detailed description of substitutions, R-groups and preferred embodiments
  c-term may be amidated
AKXNFTNRKISVQRLASYRRITSSKE

SEQ ID NO: 1412 - protein, 26 aa, Artificial Sequence
  Description of Artificial Sequence: Synthetic peptide
  MOD_RES (3)..(3): Any L- or D-natural amino acid and any non-natural amino acid; see specification as filed for detailed description of substitutions, R-groups and preferred embodiments
  c-term may be amidated
AKXNFTNRKISVQRLASYRRITSSKE

SEQ ID NO: 1413 - protein, 35 aa, Artificial Sequence; identical to SEQ ID NO: 1364
  Description of Artificial Sequence: Synthetic peptide
  MOD_RES (11)..(12): Any L- or D-natural amino acid and any non-natural amino acid; see specification as filed for detailed description of substitutions, R-groups and preferred embodiments
  c-term may be amidated

SEQ ID NO: 1414 - protein, 32 aa, Artificial Sequence; identical to SEQ ID NO: 1379
  Description of Artificial Sequence: Synthetic peptide
  MOD_RES (15)..(18): Any L- or D-natural or non-natural amino acid, and this range may encompass 1 or 4 residues; see specification as filed for detailed description of substitutions, R-groups and preferred embodiments
  c-term may be amidated

SEQ ID NO: 1415 - protein, 32 aa, Artificial Sequence; identical to SEQ ID NO: 1380
  Description of Artificial Sequence: Synthetic peptide
  MOD_RES (11)..(12): Any L- or D-natural amino acid and any non-natural amino acid; see specification as filed for detailed description of substitutions, R-groups and preferred embodiments
  MOD_RES (15)..(18): Any L- or D-natural or non-natural amino acid, and this range may encompass 1 or 4 residues; see specification as filed for detailed description of substitutions, R-groups and preferred embodiments
  c-term may be amidated

SEQ ID NO: 1416 - protein, 41 aa, Artificial Sequence; identical to SEQ ID NO: 1378
  Description of Artificial Sequence: Synthetic peptide
  MOD_RES (24)..(27): Any L- or D-natural or non-natural amino acid, and this range may encompass 1 or 4 residues; see specification as filed for detailed description of substitutions, R-groups and preferred embodiments
  c-term may be amidated

SEQ ID NO: 1417 - protein, 32 aa, Artificial Sequence; identical to SEQ ID NO: 1381
  Description of Artificial Sequence: Synthetic peptide
  MOD_RES (1)..(1): Any L- or D-natural amino acid and any non-natural amino acid; see specification as filed for detailed description of substitutions, R-groups and preferred embodiments
  MOD_RES (11)..(12): Any L- or D-natural amino acid and any non-natural amino acid; see specification as filed for detailed description of substitutions, R-groups and preferred embodiments
  MOD_RES (15)..(18): Any L- or D-natural or non-natural amino acid, and this range may encompass 1 or 4 residues; see specification as filed for detailed description of substitutions, R-groups and preferred embodiments
  c-term may be amidated

SEQ ID NO: 1418 - protein, 32 aa, Artificial Sequence; identical to SEQ ID NO: 1382
  Description of Artificial Sequence: Synthetic peptide
  MOD_RES (2)..(2): Any L- or D-natural amino acid and any non-natural amino acid; see specification as filed for detailed description of substitutions, R-groups and preferred embodiments
  MOD_RES (11)..(12): Any L- or D-natural amino acid and any non-natural amino acid; see specification as filed for detailed description of substitutions, R-groups and preferred embodiments
  MOD_RES (15)..(18): Any L- or D-natural or non-natural amino acid, and this range may encompass 1 or 4 residues; see specification as filed for detailed description of substitutions, R-groups and preferred embodiments
  c-term may be amidated

SEQ ID NO: 1419 - protein, 32 aa, Artificial Sequence; identical to SEQ ID NO: 1383
  Description of Artificial Sequence: Synthetic peptide
  MOD_RES (3)..(3): Any L- or D-natural amino acid and any non-natural amino acid; see specification as filed for detailed description of substitutions, R-groups and preferred embodiments
  MOD_RES (11)..(12): Any L- or D-natural amino acid and any non-natural amino acid; see specification as filed for detailed description of substitutions, R-groups and preferred embodiments
  MOD_RES (15)..(18): Any L- or D-natural or non-natural amino acid, and this range may encompass 1 or 4 residues; see specification as filed for detailed description of substitutions, R-groups and preferred embodiments
  c-term may be amidated

SEQ ID NO: 1420 - protein, 32 aa, Artificial Sequence; identical to SEQ ID NO: 1384
  Description of Artificial Sequence: Synthetic peptide
  MOD_RES (4)..(4): Any L- or D-natural amino acid and any non-natural amino acid; see specification as filed for detailed description of substitutions, R-groups and preferred embodiments
  MOD_RES (11)..(12): Any L- or D-natural amino acid and any non-natural amino acid; see specification as filed for detailed description of substitutions, R-groups and preferred embodiments
  MOD_RES (15)..(18): Any L- or D-natural or non-natural amino acid, and this range may encompass 1 or 4 residues; see specification as filed for detailed description of substitutions, R-groups and preferred embodiments
  c-term may be amidated

SEQ ID NO: 1421 - protein, 32 aa, Artificial Sequence; identical to SEQ ID NO: 1385
  Description of Artificial Sequence: Synthetic peptide
  MOD_RES (5)..(5): Any L- or D-natural amino acid and any non-natural amino acid; see specification as filed for detailed description of substitutions, R-groups and preferred embodiments
  MOD_RES (11)..(12): Any L- or D-natural amino acid and any non-natural amino acid; see specification as filed for detailed description of substitutions, R-groups and preferred embodiments
  MOD_RES (15)..(18): Any L- or D-natural or non-natural amino acid, and this range may encompass 1 or 4 residues; see specification as filed for detailed description of substitutions, R-groups and preferred embodiments
  c-term may be amidated

SEQ ID NO: 1422 - protein, 32 aa, Artificial Sequence; identical to SEQ ID NO: 1386
  Description of Artificial Sequence: Synthetic peptide
  MOD_RES (6)..(6): Any L- or D-natural amino acid and any non-natural amino acid; see specification as filed for detailed description of substitutions, R-groups and preferred embodiments
  MOD_RES (11)..(12): Any L- or D-natural amino acid and any non-natural amino acid; see specification as filed for detailed description of substitutions, R-groups and preferred embodiments
  MOD_RES (15)..(18): Any L- or D-natural or non-natural amino acid, and this range may encompass 1 or 4 residues; see specification as filed for detailed description of substitutions, R-groups and preferred embodiments
  c-term may be amidated

SEQ ID NO: 1423 - protein, 32 aa, Artificial Sequence; identical to SEQ ID NO: 1387
  Description of Artificial Sequence: Synthetic peptide
  MOD_RES (7)..(7): Any L- or D-natural amino acid and any non-natural amino acid; see specification as filed for detailed description of substitutions, R-groups and preferred embodiments
  MOD_RES (11)..(12): Any L- or D-natural amino acid and any non-natural amino acid; see specification as filed for detailed description of substitutions, R-groups and preferred embodiments
  MOD_RES (15)..(18): Any L- or D-natural or non-natural amino acid, and this range may encompass 1 or 4 residues; see specification as filed for detailed description of substitutions, R-groups and preferred embodiments
  c-term may be amidated

SEQ ID NO: 1424 - protein, 32 aa, Artificial Sequence; identical to SEQ ID NO: 1388
  Description of Artificial Sequence: Synthetic peptide
  MOD_RES (8)..(8): Any L- or D-natural amino acid and any non-natural amino acid; see specification as filed for detailed description of substitutions, R-groups and preferred embodiments
  MOD_RES (11)..(12): Any L- or D-natural amino acid and any non-natural amino acid; see specification as filed for detailed description of substitutions, R-groups and preferred embodiments
  MOD_RES (15)..(18): Any L- or D-natural or non-natural amino acid, and this range may encompass 1 or 4 residues; see specification as filed for detailed description of substitutions, R-groups and preferred embodiments
  c-term may be amidated

SEQ ID NO: 1425 - protein, 32 aa, Artificial Sequence; identical to SEQ ID NO: 1389
  Description of Artificial Sequence: Synthetic peptide
  MOD_RES (9)..(9): Any L- or D-natural amino acid and any non-natural amino acid; see specification as filed for detailed description of substitutions, R-groups and preferred embodiments
  MOD_RES (11)..(12): Any L- or D-natural amino acid and any non-natural amino acid; see specification as filed for detailed description of substitutions, R-groups and preferred embodiments
  MOD_RES (15)..(18): Any L- or D-natural or non-natural amino acid, and this range may encompass 1 or 4 residues; see specification as filed for detailed description of substitutions, R-groups and preferred embodiments
  c-term may be amidated

SEQ ID NO: 1426 - protein, 32 aa, Artificial Sequence; identical to SEQ ID NO: 1390
  Description of Artificial Sequence: Synthetic peptide
  MOD_RES (10)..(12): Any L- or D-natural amino acid and any non-natural amino acid; see specification as filed for detailed description of substitutions, R-groups and preferred embodiments
  MOD_RES (15)..(18): Any L- or D-natural or non-natural amino acid, and this range may encompass 1 or 4 residues; see specification as filed for detailed description of substitutions, R-groups and preferred embodiments
  c-term may be amidated

SEQ ID NO: 1427 - protein, 32 aa, Artificial Sequence; identical to SEQ ID NO: 1391
  Description of Artificial Sequence: Synthetic peptide
  MOD_RES (1)..(1): Any L- or D-natural amino acid and any non-natural amino acid; see specification as filed for detailed description of substitutions, R-groups and preferred embodiments
  MOD_RES (11)..(13): Any L- or D-natural amino acid and any non-natural amino acid; see specification as filed for detailed description of substitutions, R-groups and preferred embodiments
  MOD_RES (15)..(18): Any L- or D-natural or non-natural amino acid, and this range may encompass 1 or 4 residues; see specification as filed for detailed description of substitutions, R-groups and preferred embodiments
  c-term may be amidated

SEQ ID NO: 1428 - protein, 32 aa, Artificial Sequence; identical to SEQ ID NO: 1392
  Description of Artificial Sequence: Synthetic peptide
  MOD_RES (2)..(2): Any L- or D-natural amino acid and any non-natural amino acid; see specification as filed for detailed description of substitutions, R-groups and preferred embodiments
  MOD_RES (11)..(13): Any L- or D-natural amino acid and any non-natural amino acid; see specification as filed for detailed description of substitutions, R-groups and preferred embodiments
  MOD_RES (15)..(18): Any L- or D-natural or non-natural amino acid, and this range may encompass 1 or 4 residues; see specification as filed for detailed description of substitutions, R-groups and preferred embodiments
  c-term may be amidated

SEQ ID NO: 1429 - protein, 32 aa, Artificial Sequence; identical to SEQ ID NO: 1393
  Description of Artificial Sequence: Synthetic peptide
  MOD_RES (3)..(3): Any L- or D-natural amino acid and any non-natural amino acid; see specification as filed for detailed description of substitutions, R-groups and preferred embodiments
  MOD_RES (11)..(13): Any L- or D-natural amino acid and any non-natural amino acid; see specification as filed for detailed description of substitutions, R-groups and preferred embodiments
  MOD_RES (15)..(18): Any L- or D-natural or non-natural amino acid, and this range may encompass 1 or 4 residues; see specification as filed for detailed description of substitutions, R-groups and preferred embodiments
  c-term may be amidated

SEQ ID NO: 1430 - protein, 32 aa, Artificial Sequence; identical to SEQ ID NO: 1394
  Description of Artificial Sequence: Synthetic peptide
  MOD_RES (4)..(4): Any L- or D-natural amino acid and any non-natural amino acid; see specification as filed for detailed description of substitutions, R-groups and preferred embodiments
  MOD_RES (11)..(13): Any L- or D-natural amino acid and any non-natural amino acid; see specification as filed for detailed description of substitutions, R-groups and preferred embodiments
  MOD_RES (15)..(18): Any L- or D-natural or non-natural amino acid, and this range may encompass 1 or 4 residues; see specification as filed for detailed description of substitutions, R-groups and preferred embodiments
  c-term may be amidated

SEQ ID NO: 1431 - protein, 32 aa, Artificial Sequence; identical to SEQ ID NO: 1395
  Description of Artificial Sequence: Synthetic peptide
  MOD_RES (5)..(5): Any L- or D-natural amino acid and any non-natural amino acid; see specification as filed for detailed description of substitutions, R-groups and preferred embodiments
  MOD_RES (11)..(13): Any L- or D-natural amino acid and any non-natural amino acid; see specification as filed for detailed description of substitutions, R-groups and preferred embodiments
  MOD_RES (15)..(18): Any L- or D-natural or non-natural amino acid, and this range may encompass 1 or 4 residues; see specification as filed for detailed description of substitutions, R-groups and preferred embodiments
  c-term may be amidated

SEQ ID NO: 1432 - protein, 32 aa, Artificial Sequence; identical to SEQ ID NO: 1396
  Description of Artificial Sequence: Synthetic peptide
  MOD_RES (6)..(6): Any L- or D-natural amino acid and any non-natural amino acid; see specification as filed for detailed description of substitutions, R-groups and preferred embodiments
  MOD_RES (11)..(13): Any L- or D-natural amino acid and any non-natural amino acid; see specification as filed for detailed description of substitutions, R-groups and preferred embodiments
  MOD_RES (15)..(18): Any L- or D-natural or non-natural amino acid, and this range may encompass 1 or 4 residues; see specification as filed for detailed description of substitutions, R-groups and preferred embodiments
  c-term may be amidated

SEQ ID NO: 1433 - protein, 32 aa, Artificial Sequence; identical to SEQ ID NO: 1397
  Description of Artificial Sequence: Synthetic peptide
  MOD_RES (7)..(7): Any L- or D-natural amino acid and any non-natural amino acid; see specification as filed for detailed description of substitutions, R-groups and preferred embodiments
  MOD_RES (11)..(13): Any L- or D-natural amino acid and any non-natural amino acid; see specification as filed for detailed description of substitutions, R-groups and preferred embodiments
  MOD_RES (15)..(18): Any L- or D-natural or non-natural amino acid, and this range may encompass 1 or 4 residues; see specification as filed for detailed description of substitutions, R-groups and preferred embodiments
  c-term may be amidated

SEQ ID NO: 1434 - protein, 32 aa, Artificial Sequence; identical to SEQ ID NO: 1398
  Description of Artificial Sequence: Synthetic peptide
  MOD_RES (8)..(8): Any L- or D-natural amino acid and any non-natural amino acid; see specification as filed for detailed description of substitutions, R-groups and preferred embodiments
  MOD_RES (11)..(13): Any L- or D-natural amino acid and any non-natural amino acid; see specification as filed for detailed description of substitutions, R-groups and preferred embodiments
  MOD_RES (15)..(18): Any L- or D-natural or non-natural amino acid, and this range may encompass 1 or 4 residues; see specification as filed for detailed description of substitutions, R-groups and preferred embodiments
  c-term may be amidated

SEQ ID NO: 1435 - protein, 32 aa, Artificial Sequence; identical to SEQ ID NO: 1399
  Description of Artificial Sequence: Synthetic peptide
  MOD_RES (9)..(9): Any L- or D-natural amino acid and any non-natural amino acid; see specification as filed for detailed description of substitutions, R-groups and preferred embodiments
  MOD_RES (11)..(13): Any L- or D-natural amino acid and any non-natural amino acid; see specification as filed for detailed description of substitutions, R-groups and preferred embodiments
  MOD_RES (15)..(18): Any L- or D-natural or non-natural amino acid, and this range may encompass 1 or 4 residues; see specification as filed for detailed description of substitutions, R-groups and preferred embodiments
  c-term may be amidated

SEQ ID NO: 1436 - protein, 32 aa, Artificial Sequence; identical to SEQ ID NO: 1400
  Description of Artificial Sequence: Synthetic peptide
  MOD_RES (10)..(13): Any L- or D-natural amino acid and any non-natural amino acid; see specification as filed for detailed description of substitutions, R-groups and preferred embodiments
  MOD_RES (15)..(18): Any L- or D-natural or non-natural amino acid, and this range may encompass 1 or 4 residues; see specification as filed for detailed description of substitutions, R-groups and preferred embodiments
  c-term may be amidated

SEQ ID NO: 1437 - protein, 32 aa, Artificial Sequence; identical to SEQ ID NO: 1401
  Description of Artificial Sequence: Synthetic peptide
  MOD_RES (1)..(1): Any L- or D-natural amino acid and any non-natural amino acid; see specification as filed for detailed description of substitutions, R-groups and preferred embodiments
  MOD_RES (11)..(12): Any L- or D-natural amino acid and any non-natural amino acid; see specification as filed for detailed description of substitutions, R-groups and preferred embodiments
  MOD_RES (14)..(14): Any L- or D-natural amino acid and any non-natural amino acid; see specification as filed for detailed description of substitutions, R-groups and preferred embodiments
  MOD_RES (15)..(18): Any L- or D-natural or non-natural amino acid, and this range may encompass 1 or 4 residues; see specification as filed for detailed description of substitutions, R-groups and preferred embodiments
  c-term may be amidated

SEQ ID NO: 1438 - protein, 32 aa, Artificial Sequence; identical to SEQ ID NO: 1402
  Description of Artificial Sequence: Synthetic peptide
  MOD_RES (2)..(2): Any L- or D-natural amino acid and any non-natural amino acid; see specification as filed for detailed description of substitutions, R-groups and preferred embodiments
  MOD_RES (11)..(12): Any L- or D-natural amino acid and any non-natural amino acid; see specification as filed for detailed description of substitutions, R-groups and preferred embodiments
  MOD_RES (14)..(14): Any L- or D-natural amino acid and any non-natural amino acid; see specification as filed for detailed description of substitutions, R-groups and preferred embodiments
  MOD_RES (15)..(18): Any L- or D-natural or non-natural amino acid, and this range may encompass 1 or 4 residues; see specification as filed for detailed description of substitutions, R-groups and preferred embodiments
  c-term may be amidated

SEQ ID NO: 1439 - protein, 32 aa, Artificial Sequence; identical to SEQ ID NO: 1403
  Description of Artificial Sequence: Synthetic peptide
  MOD_RES (3)..(3): Any L- or D-natural amino acid and any non-natural amino acid; see specification as filed for detailed description of substitutions, R-groups and preferred embodiments
  MOD_RES (11)..(12): Any L- or D-natural amino acid and any non-natural amino acid; see specification as filed for detailed description of substitutions, R-groups and preferred embodiments
  MOD_RES (14)..(14): Any L- or D-natural amino acid and any non-natural amino acid; see specification as filed for detailed description of substitutions, R-groups and preferred embodiments
  MOD_RES (15)..(18): Any L- or D-natural or non-natural amino acid, and this range may encompass 1 or 4 residues; see specification as filed for detailed description of substitutions, R-groups and preferred embodiments
  c-term may be amidated

SEQ ID NO: 1440 - protein, 32 aa, Artificial Sequence; identical to SEQ ID NO: 1404
  Description of Artificial Sequence: Synthetic peptide
  MOD_RES (4)..(4): Any L- or D-natural amino acid and any non-natural amino acid; see specification as filed for detailed description of substitutions, R-groups and preferred embodiments
  MOD_RES (11)..(12): Any L- or D-natural amino acid and any non-natural amino acid; see specification as filed for detailed description of substitutions, R-groups and preferred embodiments
  MOD_RES (14)..(14): Any L- or D-natural amino acid and any non-natural amino acid; see specification as filed for detailed description of substitutions, R-groups and preferred embodiments
  MOD_RES (15)..(18): Any L- or D-natural or non-natural amino acid, and this range may encompass 1 or 4 residues; see specification as filed for detailed description of substitutions, R-groups and preferred embodiments
  c-term may be amidated

SEQ ID NO: 1441 - protein, 32 aa, Artificial Sequence; identical to SEQ ID NO: 1405
  Description of Artificial Sequence: Synthetic peptide
  MOD_RES (5)..(5): Any L- or D-natural amino acid and any non-natural amino acid; see specification as filed for detailed description of substitutions, R-groups and preferred embodiments
  MOD_RES (11)..(12): Any L- or D-natural amino acid and any non-natural amino acid; see specification as filed for detailed description of substitutions, R-groups and preferred embodiments
  MOD_RES (14)..(14): Any L- or D-natural amino acid and any non-natural amino acid; see specification as filed for detailed description of substitutions, R-groups and preferred embodiments
  MOD_RES (15)..(18): Any L- or D-natural or non-natural amino acid, and this range may encompass 1 or 4 residues; see specification as filed for detailed description of substitutions, R-groups and preferred embodiments
  c-term may be amidated

SEQ ID NO: 1442 - protein, 32 aa, Artificial Sequence; identical to SEQ ID NO: 1406
  Description of Artificial Sequence: Synthetic peptide
  MOD_RES (6)..(6): Any L- or D-natural amino acid and any non-natural amino acid; see specification as filed for detailed description of substitutions, R-groups and preferred embodiments
  MOD_RES (11)..(12): Any L- or D-natural amino acid and any non-natural amino acid; see specification as filed for detailed description of substitutions, R-groups and preferred embodiments
  MOD_RES (14)..(14): Any L- or D-natural amino acid and any non-natural amino acid; see specification as filed for detailed description of substitutions, R-groups and preferred embodiments
  MOD_RES (15)..(18): Any L- or D-natural or non-natural amino acid, and this range may encompass 1 or 4 residues; see specification as filed for detailed description of substitutions, R-groups and preferred embodiments
  c-term may be amidated

SEQ ID NO: 1443 - protein, 32 aa, Artificial Sequence; identical to SEQ ID NO: 1407
  Description of Artificial Sequence: Synthetic peptide
  MOD_RES (7)..(7): Any L- or D-natural amino acid and any non-natural amino acid; see specification as filed for detailed description of substitutions, R-groups and preferred embodiments
  MOD_RES (11)..(12): Any L- or D-natural amino acid and any non-natural amino acid; see specification as filed for detailed description of substitutions, R-groups and preferred embodiments
  MOD_RES (14)..(14): Any L- or D-natural amino acid and any non-natural amino acid; see specification as filed for detailed description of substitutions, R-groups and preferred embodiments
  MOD_RES (15)..(18): Any L- or D-natural or non-natural amino acid, and this range may encompass 1 or 4 residues; see specification as filed for detailed description of substitutions, R-groups and preferred embodiments
  c-term may be amidated

SEQ ID NO: 1444 - protein, 32 aa, Artificial Sequence; identical to SEQ ID NO: 1408
  Description of Artificial Sequence: Synthetic peptide
  MOD_RES (8)..(8): Any L- or D-natural amino acid and any non-natural amino acid; see specification as filed for detailed description of substitutions, R-groups and preferred embodiments
  MOD_RES (11)..(12): Any L- or D-natural amino acid and any non-natural amino acid; see specification as filed for detailed description of substitutions, R-groups and preferred embodiments
  MOD_RES (14)..(14): Any L- or D-natural amino acid and any non-natural amino acid; see specification as filed for detailed description of substitutions, R-groups and preferred embodiments
  MOD_RES (15)..(18): Any L- or D-natural or non-natural amino acid, and this range may encompass 1 or 4 residues; see specification as filed for detailed description of substitutions, R-groups and preferred embodiments
  c-term may be amidated

SEQ ID NO: 1445 - protein, 32 aa, Artificial Sequence; identical to SEQ ID NO: 1409
  Description of Artificial Sequence: Synthetic peptide
  MOD_RES (9)..(9): Any L- or D-natural amino acid and any non-natural amino acid; see specification as filed for detailed description of substitutions, R-groups and preferred embodiments
  MOD_RES (11)..(12): Any L- or D-natural amino acid and any non-natural amino acid; see specification as filed for detailed description of substitutions, R-groups and preferred embodiments
  MOD_RES (14)..(14): Any L- or D-natural amino acid and any non-natural amino acid; see specification as filed for detailed description of substitutions, R-groups and preferred embodiments
  MOD_RES (15)..(18): Any L- or D-natural or non-natural amino acid, and this range may encompass 1 or 4 residues; see specification as filed for detailed description of substitutions, R-groups and preferred embodiments
  c-term may be amidated

SEQ ID NO: 1446 - protein, 32 aa, Artificial Sequence; identical to SEQ ID NO: 1410
  Description of Artificial Sequence: Synthetic peptide
  MOD_RES (10)..(12): Any L- or D-natural amino acid and any non-natural amino acid; see specification as filed for detailed description of substitutions, R-groups and preferred embodiments
  MOD_RES (14)..(14): Any L- or D-natural amino acid and any non-natural amino acid; see specification as filed for detailed description of substitutions, R-groups and preferred embodiments
  MOD_RES (15)..(18): Any L- or D-natural or non-natural amino acid, and this range may encompass 1 or 4 residues; see specification as filed for detailed description of substitutions, R-groups and preferred embodiments
  c-term may be amidated

SEQ ID NO: 1447 - protein, 7 aa, Artificial Sequence
  Description of Artificial Sequence: Synthetic peptide
  c-term may be amidated
ILPIASS

SEQ ID NO: 1448 - protein, 26 aa, Artificial Sequence
  Description of Artificial Sequence: Synthetic peptide
  c-term may be amidated
ILPIASSCCTEVSHHISRRLLERVNM

SEQ ID NO: 1449 - protein, 26 aa, Artificial Sequence
  Description of Artificial Sequence: Synthetic peptide
  MOD_RES (8)..(9): Any L- or D-natural amino acid and any non-natural amino acid; see specification as filed for detailed description of substitutions, R-groups and preferred embodiments
  c-term may be amidated
ILPIASSXXTEVSHHISRRLLERVNM

SEQ ID NO: 1450 - protein, 26 aa, Artificial Sequence
  Description of Artificial Sequence: Synthetic peptide
  MOD_RES (1)..(1): Any L- or D-natural amino acid and any non-natural amino acid; see specification as filed for detailed description of substitutions, R-groups and preferred embodiments
  MOD_RES (8)..(9): Any L- or D-natural amino acid and any non-natural amino acid; see specification as filed for detailed description of substitutions, R-groups and preferred embodiments
  c-term may be amidated
XLPIASSXXTEVSHHISRRLLERVNM

SEQ ID NO: 1451 - protein, 26 aa, Artificial Sequence
  Description of Artificial Sequence: Synthetic peptide
  MOD_RES (2)..(2): Any L- or D-natural amino acid and any non-natural amino acid; see specification as filed for detailed description of substitutions, R-groups and preferred embodiments
  MOD_RES (8)..(9): Any L- or D-natural amino acid and any non-natural amino acid; see specification as filed for detailed description of substitutions, R-groups and preferred embodiments
  c-term may be amidated
IXPIASSXXTEVSHHISRRLLERVNM

SEQ ID NO: 1452 - protein, 26 aa, Artificial Sequence
  Description of Artificial Sequence: Synthetic peptide
  MOD_RES (3)..(3): Any L- or D-natural amino acid and any non-natural amino acid; see specification as filed for detailed description of substitutions, R-groups and preferred embodiments
  MOD_RES (8)..(9): Any L- or D-natural amino acid and any non-natural amino acid; see specification as filed for detailed description of substitutions, R-groups and preferred embodiments
  c-term may be amidated
ILXIASSXXTEVSHHISRRLLERVNM

SEQ ID NO: 1453 - protein, 26 aa, Artificial Sequence
  Description of Artificial Sequence: Synthetic peptide
  MOD_RES (4)..(4): Any L- or D-natural amino acid and any non-natural amino acid; see specification as filed for detailed description of substitutions, R-groups and preferred embodiments
  MOD_RES (8)..(9): Any L- or D-natural amino acid and any non-natural amino acid; see specification as filed for detailed description of substitutions, R-groups and preferred embodiments
  c-term may be amidated
ILPXASSXXTEVSHHISRRLLERVNM

SEQ ID NO: 1454 - protein, 26 aa, Artificial Sequence
  Description of Artificial Sequence: Synthetic peptide
  MOD_RES (5)..(5): Any L- or D-natural amino acid and any non-natural amino acid; see specification as filed for detailed description of substitutions, R-groups and preferred embodiments
  MOD_RES (8)..(9): Any L- or D-natural amino acid and any non-natural amino acid; see specification as filed for detailed description of substitutions, R-groups and preferred embodiments
  c-term may be amidated
ILPIXSSXXTEVSHHISRRLLERVNM

SEQ ID NO: 1455 - protein, 26 aa, Artificial Sequence
  Description of Artificial Sequence: Synthetic peptide
  MOD_RES (6)..(6): Any L- or D-natural amino acid and any non-natural amino acid; see specification as filed for detailed description of substitutions, R-groups and preferred embodiments
  MOD_RES (8)..(9): Any L- or D-natural amino acid and any non-natural amino acid; see specification as filed for detailed description of substitutions, R-groups and preferred embodiments
  c-term may be amidated
ILPIAXSXXTEVSHHISRRLLERVNM

SEQ ID NO: 1456 - protein, 26 aa, Artificial Sequence
  Description of Artificial Sequence: Synthetic peptide
  MOD_RES (7)..(9): Any L- or D-natural amino acid and any non-natural amino acid; see specification as filed for detailed description of substitutions, R-groups and preferred embodiments
  c-term may be amidated
ILPIASXXXTEVSHHISRRLLERVNM

SEQ ID NO: 1457 - protein, 17 aa, Artificial Sequence
  Description of Artificial Sequence: Synthetic peptide
  c-term may be amidated
TEVSHHISRRLLERVNM

SEQ ID NO: 1458 - protein, 23 aa, Artificial Sequence
  Description of Artificial Sequence: Synthetic peptide
  c-term may be amidated
RIQRADGDCDLAAVILHVKRRRI

SEQ ID NO: 1459 - protein, 25 aa, Artificial Sequence
  Description of Artificial Sequence: Synthetic peptide
  c-term may be amidated
VSPHNHTVKQWMKVQAAKKNGKGNV

SEQ ID NO: 1460 - protein, 28 aa, Artificial Sequence
  Description of Artificial Sequence: Synthetic peptide
  c-term may be amidated
HRKKHHGKRNSNRAHQGKHETYGHKTPY

SEQ ID NO: 1461 - protein, 32 aa, Artificial Sequence
  Description of Artificial Sequence: Synthetic peptide
  MOD_RES (15)..(18): Any L- or D-natural or non-natural amino acid, and this range may encompass 1 or 4 residues; see specification as filed for detailed description of substitutions, R-groups and preferred embodiments
  c-term may be amidated
ILPIASSCCTEVSHXXXXHRKKHHGKRNSDRA

SEQ ID NO: 1462 - protein, 32 aa, Artificial Sequence
  Description of Artificial Sequence: Synthetic peptide
  MOD_RES (1)..(1): Any L- or D-natural amino acid and any non-natural amino acid; see specification as filed for detailed description of substitutions, R-groups and preferred embodiments
  MOD_RES (8)..(9): Any L- or D-natural amino acid and any non-natural amino acid; see specification as filed for detailed description of substitutions, R-groups and preferred embodiments
  MOD_RES (15)..(18): Any L- or D-natural or non-natural amino acid, and this range may encompass 1 or 4 residues; see specification as filed for detailed description of substitutions, R-groups and preferred embodiments
  c-term may be amidated
XLPIASSXXTEVSHXXXXHRKKHHGKRNSDRA

SEQ ID NO: 1463 - protein, 32 aa, Artificial Sequence
  Description of Artificial Sequence: Synthetic peptide
  MOD_RES (2)..(2): Any L- or D-natural amino acid and any non-natural amino acid; see specification as filed for detailed description of substitutions, R-groups and preferred embodiments
  MOD_RES (8)..(9): Any L- or D-natural amino acid and any non-natural amino acid; see specification as filed for detailed description of substitutions, R-groups and preferred embodiments
  MOD_RES (15)..(18): Any L- or D-natural or non-natural amino acid, and this range may encompass 1 or 4 residues; see specification as filed for detailed description of substitutions, R-groups and preferred embodiments
  c-term may be amidated
IXPIASSXXTEVSHXXXXHRKKHHGKRNSDRA

SEQ ID NO: 1464 - protein, 32 aa, Artificial Sequence
  Description of Artificial Sequence: Synthetic peptide
  MOD_RES (3)..(3): Any L- or D-natural amino acid and any non-natural amino acid; see specification as filed for detailed description of substitutions, R-groups and preferred embodiments
  MOD_RES (8)..(9): Any L- or D-natural amino acid and any non-natural amino acid; see specification as filed for detailed description of substitutions, R-groups and preferred embodiments
  MOD_RES (15)..(18): Any L- or D-natural or non-natural amino acid, and this range may encompass 1 or 4 residues; see specification as filed for detailed description of substitutions, R-groups and preferred embodiments
  c-term may be amidated
ILXIASSXXTEVSHXXXXHRKKHHGKRNSDRA

SEQ ID NO: 1465 - protein, 32 aa, Artificial Sequence
  Description of Artificial Sequence: Synthetic peptide
  MOD_RES (4)..(4): Any L- or D-natural amino acid and any non-natural amino acid; see specification as filed for detailed description of substitutions, R-groups and preferred embodiments
  MOD_RES (8)..(9): Any L- or D-natural amino acid and any non-natural amino acid; see specification as filed for detailed description of substitutions, R-groups and preferred embodiments
  MOD_RES (15)..(18): Any L- or D-natural or non-natural amino acid, and this range may encompass 1 or 4 residues; see specification as filed for detailed description of substitutions, R-groups and preferred embodiments
  c-term may be amidated
ILPXASSXXTEVSHXXXXHRKKHHGKRNSDRA

SEQ ID NO: 1466 - protein, 32 aa, Artificial Sequence
  Description of Artificial Sequence: Synthetic peptide
  MOD_RES (5)..(5): Any L- or D-natural amino acid and any non-natural amino acid; see specification as filed for detailed description of substitutions, R-groups and preferred embodiments
  MOD_RES (8)..(9): Any L- or D-natural amino acid and any non-natural amino acid; see specification as filed for detailed description of substitutions, R-groups and preferred embodiments
  MOD_RES (15)..(18): Any L- or D-natural or non-natural amino acid, and this range may encompass 1 or 4 residues; see specification as filed for detailed description of substitutions, R-groups and preferred embodiments
  c-term may be amidated
ILPIXSSXXTEVSHXXXXHRKKHHGKRNSDRA

SEQ ID NO: 1467 - protein, 32 aa, Artificial Sequence
  Description of Artificial Sequence: Synthetic peptide
  MOD_RES (6)..(6): Any L- or D-natural amino acid and any non-natural amino acid; see specification as filed for detailed description of substitutions, R-groups and preferred embodiments
  MOD_RES (8)..(9): Any L- or D-natural amino acid and any non-natural amino acid; see specification as filed for detailed description of substitutions, R-groups and preferred embodiments
  MOD_RES (15)..(18): Any L- or D-natural or non-natural amino acid, and this range may encompass 1 or 4 residues; see specification as filed for detailed description of substitutions, R-groups and preferred embodiments
  c-term may be amidated
ILPIAXSXXTEVSHXXXXHRKKHHGKRNSDRA

SEQ ID NO: 1468 - protein, 32 aa, Artificial Sequence
  Description of Artificial Sequence: Synthetic peptide
  MOD_RES (7)..(9): Any L- or D-natural amino acid and any non-natural amino acid; see specification as filed for detailed description of substitutions, R-groups and preferred embodiments
  MOD_RES (15)..(18): Any L- or D-natural or non-natural amino acid, and this range may encompass 1 or 4 residues; see specification as filed for detailed description of substitutions, R-groups and preferred embodiments
  c-term may be amidated
ILPIASXXXTEVSHXXXXHRKKHHGKRNSDRA

SEQ ID NO: 1469 - protein, 32 aa, Artificial Sequence
  Description of Artificial Sequence: Synthetic peptide
  MOD_RES (1)..(1): Any L- or D-natural amino acid and any non-natural amino acid; see specification as filed for detailed description of substitutions, R-groups and preferred embodiments
  MOD_RES (8)..(10): Any L- or D-natural amino acid and any non-natural amino acid; see specification as filed for detailed description of substitutions, R-groups and preferred embodiments
  MOD_RES (15)..(18): Any L- or D-natural or non-natural amino acid, and this range may encompass 1 or 4 residues; see specification as filed for detailed description of substitutions, R-groups and preferred embodiments
  c-term may be amidated
XLPIASSXXXEVSHXXXXHRKKHHGKRNSDRA

SEQ ID NO: 1470 - protein, 32 aa, Artificial Sequence
  Description of Artificial Sequence: Synthetic peptide
  MOD_RES (2)..(2): Any L- or D-natural amino acid and any non-natural amino acid; see specification as filed for detailed description of substitutions, R-groups and preferred embodiments
  MOD_RES (8)..(10): Any L- or D-natural amino acid and any non-natural amino acid; see specification as filed for detailed description of substitutions, R-groups and preferred embodiments
  MOD_RES (15)..(18): Any L- or D-natural or non-natural amino acid, and this range may encompass 1 or 4 residues; see specification as filed for detailed description of substitutions, R-groups and preferred embodiments
  c-term may be amidated
IXPIASSXXXEVSHXXXXHRKKHHGKRNSDRA

SEQ ID NO: 1471 - protein, 32 aa, Artificial Sequence
  Description of Artificial Sequence: Synthetic peptide
  MOD_RES (3)..(3): Any L- or D-natural amino acid and any non-natural amino acid; see specification as filed for detailed description of substitutions, R-groups and preferred embodiments
  MOD_RES (8)..(10): Any L- or D-natural amino acid and any non-natural amino acid; see specification as filed for detailed description of substitutions, R-groups and preferred embodiments
  MOD_RES (15)..(18): Any L- or D-natural or non-natural amino acid, and this range may encompass 1 or 4 residues; see specification as filed for detailed description of substitutions, R-groups and preferred embodiments
  c-term may be amidated
ILXIASSXXXEVSHXXXXHRKKHHGKRNSDRA

SEQ ID NO: 1472 - protein, 32 aa, Artificial Sequence
  Description of Artificial Sequence: Synthetic peptide
  MOD_RES (4)..(4): Any L- or D-natural amino acid and any non-natural amino acid; see specification as filed for detailed description of substitutions, R-groups and preferred embodiments
  MOD_RES (8)..(10): Any L- or D-natural amino acid and any non-natural amino acid; see specification as filed for detailed description of substitutions, R-groups and preferred embodiments
  MOD_RES (15)..(18): Any L- or D-natural or non-natural amino acid, and this range may encompass 1 or 4 residues; see specification as filed for detailed description of substitutions, R-groups and preferred embodiments
  c-term may be amidated
ILPXASSXXXEVSHXXXXHRKKHHGKRNSDRA

SEQ ID NO: 1473 - protein, 32 aa, Artificial Sequence
  Description of Artificial Sequence: Synthetic peptide
  MOD_RES (5)..(5): Any L- or D-natural amino acid and any non-natural amino acid; see specification as filed for detailed description of substitutions, R-groups and preferred embodiments
  MOD_RES (8)..(10): Any L- or D-natural amino acid and any non-natural amino acid; see specification as filed for detailed description of substitutions, R-groups and preferred embodiments
  MOD_RES (15)..(18): Any L- or D-natural or non-natural amino acid, and this range may encompass 1 or 4 residues; see specification as filed for detailed description of substitutions, R-groups and preferred embodiments
  c-term may be amidated
ILPIXSSXXXEVSHXXXXHRKKHHGKRNSDRA

SEQ ID NO: 1474 - protein, 32 aa, Artificial Sequence
  Description of Artificial Sequence: Synthetic peptide
  MOD_RES (6)..(6): Any L- or D-natural amino acid and any non-natural amino acid; see specification as filed for detailed description of substitutions, R-groups and preferred embodiments
  MOD_RES (8)..(10): Any L- or D-natural amino acid and any non-natural amino acid; see specification as filed for detailed description of substitutions, R-groups and preferred embodiments
  MOD_RES (15)..(18): Any L- or D-natural or non-natural amino acid, and this range may encompass 1 or 4 residues; see specification as filed for detailed description of substitutions, R-groups and preferred embodiments
  c-term may be amidated
ILPIAXSXXXEVSHXXXXHRKKHHGKRNSDRA

SEQ ID NO: 1475 - protein, 32 aa, Artificial Sequence
  Description of Artificial Sequence: Synthetic peptide
  MOD_RES (7)..(10): Any L- or D-natural amino acid and any non-natural amino acid; see specification as filed for detailed description of substitutions, R-groups and preferred embodiments
  MOD_RES (15)..(18): Any L- or D-natural or non-natural amino acid, and this range may encompass 1 or 4 residues; see specification as filed for detailed description of substitutions, R-groups and preferred embodiments
  c-term may be amidated
ILPIASXXXXEVSHXXXXHRKKHHGKRNSDRA

SEQ ID NO: 1476 - protein, 32 aa, Artificial Sequence
  Description of Artificial Sequence: Synthetic peptide
  MOD_RES (1)..(1): Any L- or D-natural amino acid and any non-natural amino acid; see specification as filed for detailed description of substitutions, R-groups and preferred embodiments
  MOD_RES (8)..(9): Any L- or D-natural amino acid and any non-natural amino acid; see specification as filed for detailed description of substitutions, R-groups and preferred embodiments
  MOD_RES (11)..(11): Any L- or D-natural amino acid and any non-natural amino acid; see specification as filed for detailed description of substitutions, R-groups and preferred embodiments
  MOD_RES (15)..(18): Any L- or D-natural or non-natural amino acid, and this range may encompass 1 or 4 residues; see specification as filed for detailed description of substitutions, R-groups and preferred embodiments
  c-term may be amidated
XLPIASSXXTXVSHXXXXHRKKHHGKRNSDRA

SEQ ID NO: 1477 - protein, 32 aa, Artificial Sequence
  Description of Artificial Sequence: Synthetic peptide
  MOD_RES (2)..(2): Any L- or D-natural amino acid and any non-natural amino acid; see specification as filed for detailed description of substitutions, R-groups and preferred embodiments
  MOD_RES (8)..(9): Any L- or D-natural amino acid and any non-natural amino acid; see specification as filed for detailed description of substitutions, R-groups and preferred embodiments
  MOD_RES (11)..(11): Any L- or D-natural amino acid and any non-natural amino acid; see specification as filed for detailed description of substitutions, R-groups and preferred embodiments
  MOD_RES (15)..(18): Any L- or D-natural or non-natural amino acid, and this range may encompass 1 or 4 residues; see specification as filed for detailed description of substitutions, R-groups and preferred embodiments
  c-term may be amidated
IXPIASSXXTXVSHXXXXHRKKHHGKRNSDRA

SEQ ID NO: 1478 - protein, 32 aa, Artificial Sequence
  Description of Artificial Sequence: Synthetic peptide
  MOD_RES (3)..(3): Any L- or D-natural amino acid and any non-natural amino acid; see specification as filed for detailed description of substitutions, R-groups and preferred embodiments
  MOD_RES (8)..(9): Any L- or D-natural amino acid and any non-natural amino acid; see specification as filed for detailed description of substitutions, R-groups and preferred embodiments
  MOD_RES (11)..(11): Any L- or D-natural amino acid and any non-natural amino acid; see specification as filed for detailed description of substitutions, R-groups and preferred embodiments
  MOD_RES (15)..(18): Any L- or D-natural or non-natural amino acid, and this range may encompass 1 or 4 residues; see specification as filed for detailed description of substitutions, R-groups and preferred embodiments
  c-term may be amidated
ILXIASSXXTXVSHXXXXHRKKHHGKRNSDRA

SEQ ID NO: 1479 - protein, 32 aa, Artificial Sequence
  Description of Artificial Sequence: Synthetic peptide
  MOD_RES (4)..(4): Any L- or D-natural amino acid and any non-natural amino acid; see specification as filed for detailed description of substitutions, R-groups and preferred embodiments
  MOD_RES (8)..(9): Any L- or D-natural amino acid and any non-natural amino acid; see specification as filed for detailed description of substitutions, R-groups and preferred embodiments
  MOD_RES (11)..(11): Any L- or D-natural amino acid and any non-natural amino acid; see specification as filed for detailed description of substitutions, R-groups and preferred embodiments
  MOD_RES (15)..(18): Any L- or D-natural or non-natural amino acid, and this range may encompass 1 or 4 residues; see specification as filed for detailed description of substitutions, R-groups and preferred embodiments
  c-term may be amidated
ILPXASSXXTXVSHXXXXHRKKHHGKRNSDRA

SEQ ID NO: 1480 - protein, 32 aa, Artificial Sequence
  Description of Artificial Sequence: Synthetic peptide
  MOD_RES (5)..(5): Any L- or D-natural amino acid and any non-natural amino acid; see specification as filed for detailed description of substitutions, R-groups and preferred embodiments
  MOD_RES (8)..(9): Any L- or D-natural amino acid and any non-natural amino acid; see specification as filed for detailed description of substitutions, R-groups and preferred embodiments
  MOD_RES (11)..(11): Any L- or D-natural amino acid and any non-natural amino acid; see specification as filed for detailed description of substitutions, R-groups and preferred embodiments
  MOD_RES (15)..(18): Any L- or D-natural or non-natural amino acid, and this range may encompass 1 or 4 residues; see specification as filed for detailed description of substitutions, R-groups and preferred embodiments
  c-term may be amidated
ILPIXSSXXTXVSHXXXXHRKKHHGKRNSDRA

SEQ ID NO: 1481 - protein, 32 aa, Artificial Sequence
  Description of Artificial Sequence: Synthetic peptide
  MOD_RES (6)..(6): Any L- or D-natural amino acid and any non-natural amino acid; see specification as filed for detailed description of substitutions, R-groups and preferred embodiments
  MOD_RES (8)..(9): Any L- or D-natural amino acid and any non-natural amino acid; see specification as filed for detailed description of substitutions, R-groups and preferred embodiments
  MOD_RES (11)..(11): Any L- or D-natural amino acid and any non-natural amino acid; see specification as filed for detailed description of substitutions, R-groups and preferred embodiments
  MOD_RES (15)..(18): Any L- or D-natural or non-natural amino acid, and this range may encompass 1 or 4 residues; see specification as filed for detailed description of substitutions, R-groups and preferred embodiments
  c-term may be amidated
ILPIAXSXXTXVSHXXXXHRKKHHGKRNSDRA

SEQ ID NO: 1482 - protein, 32 aa, Artificial Sequence
  Description of Artificial Sequence: Synthetic peptide
  MOD_RES (7)..(9): Any L- or D-natural amino acid and any non-natural amino acid; see specification as filed for detailed description of substitutions, R-groups and preferred embodiments
  MOD_RES (11)..(11): Any L- or D-natural amino acid and any non-natural amino acid; see specification as filed for detailed description of substitutions, R-groups and preferred embodiments
  MOD_RES (15)..(18): Any L- or D-natural or non-natural amino acid, and this range may encompass 1 or 4 residues; see specification as filed for detailed description of substitutions, R-groups and preferred embodiments
  c-term may be amidated
ILPIASXXXTXVSHXXXXHRKKHHGKRNSDRA

SEQ ID NO: 1483 - protein, 32 aa, Artificial Sequence
  Description of Artificial Sequence: Synthetic peptide
  MOD_RES (1)..(1): Any L- or D-natural amino acid and any non-natural amino acid; see specification as filed for detailed description of substitutions, R-groups and preferred embodiments
  MOD_RES (8)..(9): Any L- or D-natural amino acid and any non-natural amino acid; see specification as filed for detailed description of substitutions, R-groups and preferred embodiments
  MOD_RES (12)..(12): Any L- or D-natural amino acid and any non-natural amino acid; see specification as filed for detailed description of substitutions, R-groups and preferred embodiments
  MOD_RES (15)..(18): Any L- or D-natural or non-natural amino acid, and this range may encompass 1 or 4 residues; see specification as filed for detailed description of substitutions, R-groups and preferred embodiments
  c-term may be amidated
XLPIASSXXTEXSHXXXXHRKKHHGKRNSDRA

SEQ ID NO: 1484 - protein, 32 aa, Artificial Sequence
  Description of Artificial Sequence: Synthetic peptide
  MOD_RES (2)..(2): Any L- or D-natural amino acid and any non-natural amino acid; see specification as filed for detailed description of substitutions, R-groups and preferred embodiments
  MOD_RES (8)..(9): Any L- or D-natural amino acid and any non-natural amino acid; see specification as filed for detailed description of substitutions, R-groups and preferred embodiments
  MOD_RES (12)..(12): Any L- or D-natural amino acid and any non-natural amino acid; see specification as filed for detailed description of substitutions, R-groups and preferred embodiments
  MOD_RES (15)..(18): Any L- or D-natural or non-natural amino acid, and this range may encompass 1 or 4 residues; see specification as filed for detailed description of substitutions, R-groups and preferred embodiments
  c-term may be amidated
IXPIASSXXTEXSHXXXXHRKKHHGKRNSDRA

SEQ ID NO: 1485 - protein, 32 aa, Artificial Sequence
  Description of Artificial Sequence: Synthetic peptide
  MOD_RES (3)..(3): Any L- or D-natural amino acid and any non-natural amino acid; see specification as filed for detailed description of substitutions, R-groups and preferred embodiments
  MOD_RES (8)..(9): Any L- or D-natural amino acid and any non-natural amino acid; see specification as filed for detailed description of substitutions, R-groups and preferred embodiments
  MOD_RES (12)..(12): Any L- or D-natural amino acid and any non-natural amino acid; see specification as filed for detailed description of substitutions, R-groups and preferred embodiments
  MOD_RES (15)..(18): Any L- or D-natural or non-natural amino acid, and this range may encompass 1 or 4 residues; see specification as filed for detailed description of substitutions, R-groups and preferred embodiments
  c-term may be amidated
ILXIASSXXTEXSHXXXXHRKKHHGKRNSDRA

SEQ ID NO: 1486 - protein, 32 aa, Artificial Sequence
  Description of Artificial Sequence: Synthetic peptide
  MOD_RES (4)..(4): Any L- or D-natural amino acid and any non-natural amino acid; see specification as filed for detailed description of substitutions, R-groups and preferred embodiments
  MOD_RES (8)..(9): Any L- or D-natural amino acid and any non-natural amino acid; see specification as filed for detailed description of substitutions, R-groups and preferred embodiments
  MOD_RES (12)..(12): Any L- or D-natural amino acid and any non-natural amino acid; see specification as filed for detailed description of substitutions, R-groups and preferred embodiments
  MOD_RES (15)..(18): Any L- or D-natural or non-natural amino acid, and this range may encompass 1 or 4 residues; see specification as filed for detailed description of substitutions, R-groups and preferred embodiments
  c-term may be amidated
ILPXASSXXTEXSHXXXXHRKKHHGKRNSDRA

SEQ ID NO: 1487 - protein, 32 aa, Artificial Sequence
  Description of Artificial Sequence: Synthetic peptide
  MOD_RES (5)..(5): Any L- or D-natural amino acid and any non-natural amino acid; see specification as filed for detailed description of substitutions, R-groups and preferred embodiments
  MOD_RES (8)..(9): Any L- or D-natural amino acid and any non-natural amino acid; see specification as filed for detailed description of substitutions, R-groups and preferred embodiments
  MOD_RES (12)..(12): Any L- or D-natural amino acid and any non-natural amino acid; see specification as filed for detailed description of substitutions, R-groups and preferred embodiments
  MOD_RES (15)..(18): Any L- or D-natural or non-natural amino acid, and this range may encompass 1 or 4 residues; see specification as filed for detailed description of substitutions, R-groups and preferred embodiments
  c-term may be amidated
ILPIXSSXXTEXSHXXXXHRKKHHGKRNSDRA

SEQ ID NO: 1488 - protein, 32 aa, Artificial Sequence
  Description of Artificial Sequence: Synthetic peptide
  MOD_RES (6)..(6): Any L- or D-natural amino acid and any non-natural amino acid; see specification as filed for detailed description of substitutions, R-groups and preferred embodiments
  MOD_RES (8)..(9): Any L- or D-natural amino acid and any non-natural amino acid; see specification as filed for detailed description of substitutions, R-groups and preferred embodiments
  MOD_RES (12)..(12): Any L- or D-natural amino acid and any non-natural amino acid; see specification as filed for detailed description of substitutions, R-groups and preferred embodiments
  MOD_RES (15)..(18): Any L- or D-natural or non-natural amino acid, and this range may encompass 1 or 4 residues; see specification as filed for detailed description of substitutions, R-groups and preferred embodiments
  c-term may be amidated
ILPIAXSXXTEXSHXXXXHRKKHHGKRNSDRA

SEQ ID NO: 1489 - protein, 32 aa, Artificial Sequence
  Description of Artificial Sequence: Synthetic peptide
  MOD_RES (7)..(9): Any L- or D-natural amino acid and any non-natural amino acid; see specification as filed for detailed description of substitutions, R-groups and preferred embodiments
  MOD_RES (12)..(12): Any L- or D-natural amino acid and any non-natural amino acid; see specification as filed for detailed description of substitutions, R-groups and preferred embodiments
  MOD_RES (15)..(18): Any L- or D-natural or non-natural amino acid, and this range may encompass 1 or 4 residues; see specification as filed for detailed description of substitutions, R-groups and preferred embodiments
  c-term may be amidated
ILPIASXXXTEXSHXXXXHRKKHHGKRNSDRA

SEQ ID NO: 1490 - protein, 32 aa, Artificial Sequence
  Description of Artificial Sequence: Synthetic peptide
  MOD_RES (1)..(1): Any L- or D-natural amino acid and any non-natural amino acid; see specification as filed for detailed description of substitutions, R-groups and preferred embodiments
  MOD_RES (8)..(9): Any L- or D-natural amino acid and any non-natural amino acid; see specification as filed for detailed description of substitutions, R-groups and preferred embodiments
  MOD_RES (13)..(13): Any L- or D-natural amino acid and any non-natural amino acid; see specification as filed for detailed description of substitutions, R-groups and preferred embodiments
  MOD_RES (15)..(18): Any L- or D-natural or non-natural amino acid, and this range may encompass 1 or 4 residues; see specification as filed for detailed description of substitutions, R-groups and preferred embodiments
  c-term may be amidated
XLPIASSXXTEVXHXXXXHRKKHHGKRNSDRA

SEQ ID NO: 1491 - protein, 32 aa, Artificial Sequence
  Description of Artificial Sequence: Synthetic peptide
  MOD_RES (2)..(2): Any L- or D-natural amino acid and any non-natural amino acid; see specification as filed for detailed description of substitutions, R-groups and preferred embodiments
  MOD_RES (8)..(9): Any L- or D-natural amino acid and any non-natural amino acid; see specification as filed for detailed description of substitutions, R-groups and preferred embodiments
  MOD_RES (13)..(13): Any L- or D-natural amino acid and any non-natural amino acid; see specification as filed for detailed description of substitutions, R-groups and preferred embodiments
  MOD_RES (15)..(18): Any L- or D-natural or non-natural amino acid, and this range may encompass 1 or 4 residues; see specification as filed for detailed description of substitutions, R-groups and preferred embodiments
  c-term may be amidated
IXPIASSXXTEVXHXXXXHRKKHHGKRNSDRA

SEQ ID NO: 1492 - protein, 32 aa, Artificial Sequence
  Description of Artificial Sequence: Synthetic peptide
  MOD_RES (3)..(3): Any L- or D-natural amino acid and any non-natural amino acid; see specification as filed for detailed description of substitutions, R-groups and preferred embodiments
  MOD_RES (8)..(9): Any L- or D-natural amino acid and any non-natural amino acid; see specification as filed for detailed description of substitutions, R-groups and preferred embodiments
  MOD_RES (13)..(13): Any L- or D-natural amino acid and any non-natural amino acid; see specification as filed for detailed description of substitutions, R-groups and preferred embodiments
  MOD_RES (15)..(18): Any L- or D-natural or non-natural amino acid, and this range may encompass 1 or 4 residues; see specification as filed for detailed description of substitutions, R-groups and preferred embodiments
  c-term may be amidated
ILXIASSXXTEVXHXXXXHRKKHHGKRNSDRA

SEQ ID NO: 1493 - protein, 32 aa, Artificial Sequence
  Description of Artificial Sequence: Synthetic peptide
  MOD_RES (4)..(4): Any L- or D-natural amino acid and any non-natural amino acid; see specification as filed for detailed description of substitutions, R-groups and preferred embodiments
  MOD_RES (8)..(9): Any L- or D-natural amino acid and any non-natural amino acid; see specification as filed for detailed description of substitutions, R-groups and preferred embodiments
  MOD_RES (13)..(13): Any L- or D-natural amino acid and any non-natural amino acid; see specification as filed for detailed description of substitutions, R-groups and preferred embodiments
  MOD_RES (15)..(18): Any L- or D-natural or non-natural amino acid, and this range may encompass 1 or 4 residues; see specification as filed for detailed description of substitutions, R-groups and preferred embodiments
  c-term may be amidated
ILPXASSXXTEVXHXXXXHRKKHHGKRNSDRA

SEQ ID NO: 1494 - protein, 32 aa, Artificial Sequence
  Description of Artificial Sequence: Synthetic peptide
  MOD_RES (5)..(5): Any L- or D-natural amino acid and any non-natural amino acid; see specification as filed for detailed description of substitutions, R-groups and preferred embodiments
  MOD_RES (8)..(9): Any L- or D-natural amino acid and any non-natural amino acid; see specification as filed for detailed description of substitutions, R-groups and preferred embodiments
  MOD_RES (13)..(13): Any L- or D-natural amino acid and any non-natural amino acid; see specification as filed for detailed description of substitutions, R-groups and preferred embodiments
  MOD_RES (15)..(18): Any L- or D-natural or non-natural amino acid, and this range may encompass 1 or 4 residues; see specification as filed for detailed description of substitutions, R-groups and preferred embodiments
  c-term may be amidated
ILPIXSSXXTEVXHXXXXHRKKHHGKRNSDRA

SEQ ID NO: 1495 - protein, 32 aa, Artificial Sequence
  Description of Artificial Sequence: Synthetic peptide
  MOD_RES (6)..(6): Any L- or D-natural amino acid and any non-natural amino acid; see specification as filed for detailed description of substitutions, R-groups and preferred embodiments
  MOD_RES (8)..(9): Any L- or D-natural amino acid and any non-natural amino acid; see specification as filed for detailed description of substitutions, R-groups and preferred embodiments
  MOD_RES (13)..(13): Any L- or D-natural amino acid and any non-natural amino acid; see specification as filed for detailed description of substitutions, R-groups and preferred embodiments
  MOD_RES (15)..(18): Any L- or D-natural or non-natural amino acid, and this range may encompass 1 or 4 residues; see specification as filed for detailed description of substitutions, R-groups and preferred embodiments
  c-term may be amidated
ILPIAXSXXTEVXHXXXXHRKKHHGKRNSDRA

SEQ ID NO: 1496 - protein, 32 aa, Artificial Sequence
  Description of Artificial Sequence: Synthetic peptide
  MOD_RES (7)..(9): Any L- or D-natural amino acid and any non-natural amino acid; see specification as filed for detailed description of substitutions, R-groups and preferred embodiments
  MOD_RES (13)..(13): Any L- or D-natural amino acid and any non-natural amino acid; see specification as filed for detailed description of substitutions, R-groups and preferred embodiments
  MOD_RES (15)..(18): Any L- or D-natural or non-natural amino acid, and this range may encompass 1 or 4 residues; see specification as filed for detailed description of substitutions, R-groups and preferred embodiments
  c-term may be amidated
ILPIASXXXTEVXHXXXXHRKKHHGKRNSDRA

SEQ ID NO: 1497 - protein, 32 aa, Artificial Sequence
  Description of Artificial Sequence: Synthetic peptide
  MOD_RES (1)..(1): Any L- or D-natural amino acid and any non-natural amino acid; see specification as filed for detailed description of substitutions, R-groups and preferred embodiments
  MOD_RES (8)..(9): Any L- or D-natural amino acid and any non-natural amino acid; see specification as filed for detailed description of substitutions, R-groups and preferred embodiments
  MOD_RES (14)..(14): Any L- or D-natural amino acid and any non-natural amino acid; see specification as filed for detailed description of substitutions, R-groups and preferred embodiments
  MOD_RES (15)..(18): Any L- or D-natural or non-natural amino acid, and this range may encompass 1 or 4 residues; see specification as filed for detailed description of substitutions, R-groups and preferred embodiments
  c-term may be amidated
XLPIASSXXTEVSXXXXXHRKKHHGKRNSDRA

SEQ ID NO: 1498 - protein, 32 aa, Artificial Sequence
  Description of Artificial Sequence: Synthetic peptide
  MOD_RES (2)..(2): Any L- or D-natural amino acid and any non-natural amino acid; see specification as filed for detailed description of substitutions, R-groups and preferred embodiments
  MOD_RES (8)..(9): Any L- or D-natural amino acid and any non-natural amino acid; see specification as filed for detailed description of substitutions, R-groups and preferred embodiments
  MOD_RES (14)..(14): Any L- or D-natural amino acid and any non-natural amino acid; see specification as filed for detailed description of substitutions, R-groups and preferred embodiments
  MOD_RES (15)..(18): Any L- or D-natural or non-natural amino acid, and this range may encompass 1 or 4 residues; see specification as filed for detailed description of substitutions, R-groups and preferred embodiments
  c-term may be amidated
IXPIASSXXTEVSXXXXXHRKKHHGKRNSDRA

SEQ ID NO: 1499 - protein, 32 aa, Artificial Sequence
  Description of Artificial Sequence: Synthetic peptide
  MOD_RES (3)..(3): Any L- or D-natural amino acid and any non-natural amino acid; see specification as filed for detailed description of substitutions, R-groups and preferred embodiments
  MOD_RES (8)..(9): Any L- or D-natural amino acid and any non-natural amino acid; see specification as filed for detailed description of substitutions, R-groups and preferred embodiments
  MOD_RES (14)..(14): Any L- or D-natural amino acid and any non-natural amino acid; see specification as filed for detailed description of substitutions, R-groups and preferred embodiments
  MOD_RES (15)..(18): Any L- or D-natural or non-natural amino acid, and this range may encompass 1 or 4 residues; see specification as filed for detailed description of substitutions, R-groups and preferred embodiments
  c-term may be amidated
ILXIASSXXTEVSXXXXXHRKKHHGKRNSDRA

SEQ ID NO: 1500 - protein, 32 aa, Artificial Sequence
  Description of Artificial Sequence: Synthetic peptide
  MOD_RES (4)..(4): Any L- or D-natural amino acid and any non-natural amino acid; see specification as filed for detailed description of substitutions, R-groups and preferred embodiments
  MOD_RES (8)..(9): Any L- or D-natural amino acid and any non-natural amino acid; see specification as filed for detailed description of substitutions, R-groups and preferred embodiments
  MOD_RES (14)..(14): Any L- or D-natural amino acid and any non-natural amino acid; see specification as filed for detailed description of substitutions, R-groups and preferred embodiments
  MOD_RES (15)..(18): Any L- or D-natural or non-natural amino acid, and this range may encompass 1 or 4 residues; see specification as filed for detailed description of substitutions, R-groups and preferred embodiments
  c-term may be amidated
ILPXASSXXTEVSXXXXXHRKKHHGKRNSDRA

SEQ ID NO: 1501 - protein, 32 aa, Artificial Sequence
  Description of Artificial Sequence: Synthetic peptide
  MOD_RES (5)..(5): Any L- or D-natural amino acid and any non-natural amino acid; see specification as filed for detailed description of substitutions, R-groups and preferred embodiments
  MOD_RES (8)..(9): Any L- or D-natural amino acid and any non-natural amino acid; see specification as filed for detailed description of substitutions, R-groups and preferred embodiments
  MOD_RES (14)..(14): Any L- or D-natural amino acid and any non-natural amino acid; see specification as filed for detailed description of substitutions, R-groups and preferred embodiments
  MOD_RES (15)..(18): Any L- or D-natural or non-natural amino acid, and this range may encompass 1 or 4 residues; see specification as filed for detailed description of substitutions, R-groups and preferred embodiments
  c-term may be amidated
ILPIXSSXXTEVSXXXXXHRKKHHGKRNSDRA

SEQ ID NO: 1502 - protein, 32 aa, Artificial Sequence
  Description of Artificial Sequence: Synthetic peptide
  MOD_RES (6)..(6): Any L- or D-natural amino acid and any non-natural amino acid; see specification as filed for detailed description of substitutions, R-groups and preferred embodiments
  MOD_RES (8)..(9): Any L- or D-natural amino acid and any non-natural amino acid; see specification as filed for detailed description of substitutions, R-groups and preferred embodiments
  MOD_RES (14)..(14): Any L- or D-natural amino acid and any non-natural amino acid; see specification as filed for detailed description of substitutions, R-groups and preferred embodiments
  MOD_RES (15)..(18): Any L- or D-natural or non-natural amino acid, and this range may encompass 1 or 4 residues; see specification as filed for detailed description of substitutions, R-groups and preferred embodiments
  c-term may be amidated
ILPIAXSXXTEVSXXXXXHRKKHHGKRNSDRA

SEQ ID NO: 1503 - protein, 32 aa, Artificial Sequence
  Description of Artificial Sequence: Synthetic peptide
  MOD_RES (7)..(9): Any L- or D-natural amino acid and any non-natural amino acid; see specification as filed for detailed description of substitutions, R-groups and preferred embodiments
  MOD_RES (14)..(14): Any L- or D-natural amino acid and any non-natural amino acid; see specification as filed for detailed description of substitutions, R-groups and preferred embodiments
  MOD_RES (15)..(18): Any L- or D-natural or non-natural amino acid, and this range may encompass 1 or 4 residues; see specification as filed for detailed description of substitutions, R-groups and preferred embodiments
  c-term may be amidated
ILPIASXXXTEVSXXXXXHRKKHHGKRNSDRA

SEQ ID NO: 1504 - protein, 33 aa, Artificial Sequence
  Description of Artificial Sequence: Synthetic peptide
  MOD_RES (1)..(1): Any L- or D-natural amino acid and any non-natural amino acid; see specification as filed for detailed description of substitutions, R-groups and preferred embodiments
  MOD_RES (8)..(9): Any L- or D-natural amino acid and any non-natural amino acid; see specification as filed for detailed description of substitutions, R-groups and preferred embodiments
  MOD_RES (15)..(18): Any L- or D-natural or non-natural amino acid, and this range may encompass 1 or 4 residues; see specification as filed for detailed description of substitutions, R-groups and preferred embodiments
  c-term may be amidated
XLPIASSXXTEVSHXXXXAHQGKHETYGHKTPY

SEQ ID NO: 1505 - protein, 33 aa, Artificial Sequence
  Description of Artificial Sequence: Synthetic peptide
  MOD_RES (2)..(2): Any L- or D-natural amino acid and any non-natural amino acid; see specification as filed for detailed description of substitutions, R-groups and preferred embodiments
  MOD_RES (8)..(9): Any L- or D-natural amino acid and any non-natural amino acid; see specification as filed for detailed description of substitutions, R-groups and preferred embodiments
  MOD_RES (15)..(18): Any L- or D-natural or non-natural amino acid, and this range may encompass 1 or 4 residues; see specification as filed for detailed description of substitutions, R-groups and preferred embodiments
  c-term may be amidated
IXPIASSXXTEVSHXXXXAHQGKHETYGHKTPY

SEQ ID NO: 1506 - protein, 33 aa, Artificial Sequence
  Description of Artificial Sequence: Synthetic peptide
  MOD_RES (3)..(3): Any L- or D-natural amino acid and any non-natural amino acid; see specification as filed for detailed description of substitutions, R-groups and preferred embodiments
  MOD_RES (8)..(9): Any L- or D-natural amino acid and any non-natural amino acid; see specification as filed for detailed description of substitutions, R-groups and preferred embodiments
  MOD_RES (15)..(18): Any L- or D-natural or non-natural amino acid, and this range may encompass 1 or 4 residues; see specification as filed for detailed description of substitutions, R-groups and preferred embodiments
  c-term may be amidated
ILXIASSXXTEVSHXXXXAHQGKHETYGHKTPY

SEQ ID NO: 1507 - protein, 33 aa, Artificial Sequence
  Description of Artificial Sequence: Synthetic peptide
  MOD_RES (4)..(4): Any L- or D-natural amino acid and any non-natural amino acid; see specification as filed for detailed description of substitutions, R-groups and preferred embodiments
  MOD_RES (8)..(9): Any L- or D-natural amino acid and any non-natural amino acid; see specification as filed for detailed description of substitutions, R-groups and preferred embodiments
  MOD_RES (15)..(18): Any L- or D-natural or non-natural amino acid, and this range may encompass 1 or 4 residues; see specification as filed for detailed description of substitutions, R-groups and preferred embodiments
  c-term may be amidated
ILPXASSXXTEVSHXXXXAHQGKHETYGHKTPY

SEQ ID NO: 1508 - protein, 33 aa, Artificial Sequence
  Description of Artificial Sequence: Synthetic peptide
  MOD_RES (5)..(5): Any L- or D-natural amino acid and any non-natural amino acid; see specification as filed for detailed description of substitutions, R-groups and preferred embodiments
  MOD_RES (8)..(9): Any L- or D-natural amino acid and any non-natural amino acid; see specification as filed for detailed description of substitutions, R-groups and preferred embodiments
  MOD_RES (15)..(18): Any L- or D-natural or non-natural amino acid, and this range may encompass 1 or 4 residues; see specification as filed for detailed description of substitutions, R-groups and preferred embodiments
  c-term may be amidated
ILPIXSSXXTEVSHXXXXAHQGKHETYGHKTPY

SEQ ID NO: 1509 - protein, 33 aa, Artificial Sequence
  Description of Artificial Sequence: Synthetic peptide
  MOD_RES (6)..(6): Any L- or D-natural amino acid and any non-natural amino acid; see specification as filed for detailed description of substitutions, R-groups and preferred embodiments
  MOD_RES (8)..(9): Any L- or D-natural amino acid and any non-natural amino acid; see specification as filed for detailed description of substitutions, R-groups and preferred embodiments
  MOD_RES (15)..(18): Any L- or D-natural or non-natural amino acid, and this range may encompass 1 or 4 residues; see specification as filed for detailed description of substitutions, R-groups and preferred embodiments
  c-term may be amidated
ILPIAXSXXTEVSHXXXXAHQGKHETYGHKTPY

SEQ ID NO: 1510 - protein, 33 aa, Artificial Sequence
  Description of Artificial Sequence: Synthetic peptide
  MOD_RES (7)..(9): Any L- or D-natural amino acid and any non-natural amino acid; see specification as filed for detailed description of substitutions, R-groups and preferred embodiments
  MOD_RES (15)..(18): Any L- or D-natural or non-natural amino acid, and this range may encompass 1 or 4 residues; see specification as filed for detailed description of substitutions, R-groups and preferred embodiments
  c-term may be amidated
ILPIASXXXTEVSHXXXXAHQGKHETYGHKTPY

SEQ ID NO: 1511 - protein, 33 aa, Artificial Sequence
  Description of Artificial Sequence: Synthetic peptide
  MOD_RES (1)..(1): Any L- or D-natural amino acid and any non-natural amino acid; see specification as filed for detailed description of substitutions, R-groups and preferred embodiments
  MOD_RES (8)..(10): Any L- or D-natural amino acid and any non-natural amino acid; see specification as filed for detailed description of substitutions, R-groups and preferred embodiments
  MOD_RES (15)..(18): Any L- or D-natural or non-natural amino acid, and this range may encompass 1 or 4 residues; see specification as filed for detailed description of substitutions, R-groups and preferred embodiments
  c-term may be amidated
XLPIASSXXXEVSHXXXXAHQGKHETYGHKTPY

SEQ ID NO: 1512 - protein, 33 aa, Artificial Sequence
  Description of Artificial Sequence: Synthetic peptide
  MOD_RES (2)..(2): Any L- or D-natural amino acid and any non-natural amino acid; see specification as filed for detailed description of substitutions, R-groups and preferred embodiments
  MOD_RES (8)..(10): Any L- or D-natural amino acid and any non-natural amino acid; see specification as filed for detailed description of substitutions, R-groups and preferred embodiments
  MOD_RES (15)..(18): Any L- or D-natural or non-natural amino acid, and this range may encompass 1 or 4 residues; see specification as filed for detailed description of substitutions, R-groups and preferred embodiments
  c-term may be amidated
IXPIASSXXXEVSHXXXXAHQGKHETYGHKTPY

SEQ ID NO: 1513 - protein, 33 aa, Artificial Sequence
  Description of Artificial Sequence: Synthetic peptide
  MOD_RES (3)..(3): Any L- or D-natural amino acid and any non-natural amino acid; see specification as filed for detailed description of substitutions, R-groups and preferred embodiments
  MOD_RES (8)..(10): Any L- or D-natural amino acid and any non-natural amino acid; see specification as filed for detailed description of substitutions, R-groups and preferred embodiments
  MOD_RES (15)..(18): Any L- or D-natural or non-natural amino acid, and this range may encompass 1 or 4 residues; see specification as filed for detailed description of substitutions, R-groups and preferred embodiments
  c-term may be amidated
ILXIASSXXXEVSHXXXXAHQGKHETYGHKTPY

SEQ ID NO: 1514 - protein, 33 aa, Artificial Sequence
  Description of Artificial Sequence: Synthetic peptide
  MOD_RES (4)..(4): Any L- or D-natural amino acid and any non-natural amino acid; see specification as filed for detailed description of substitutions, R-groups and preferred embodiments
  MOD_RES (8)..(10): Any L- or D-natural amino acid and any non-natural amino acid; see specification as filed for detailed description of substitutions, R-groups and preferred embodiments
  MOD_RES (15)..(18): Any L- or D-natural or non-natural amino acid, and this range may encompass 1 or 4 residues; see specification as filed for detailed description of substitutions, R-groups and preferred embodiments
  c-term may be amidated
ILPXASSXXXEVSHXXXXAHQGKHETYGHKTPY

SEQ ID NO: 1515 - protein, 33 aa, Artificial Sequence
  Description of Artificial Sequence: Synthetic peptide
  MOD_RES (5)..(5): Any L- or D-natural amino acid and any non-natural amino acid; see specification as filed for detailed description of substitutions, R-groups and preferred embodiments
  MOD_RES (8)..(10): Any L- or D-natural amino acid and any non-natural amino acid; see specification as filed for detailed description of substitutions, R-groups and preferred embodiments
  MOD_RES (15)..(18): Any L- or D-natural or non-natural amino acid, and this range may encompass 1 or 4 residues; see specification as filed for detailed description of substitutions, R-groups and preferred embodiments
  c-term may be amidated
ILPIXSSXXXEVSHXXXXAHQGKHETYGHKTPY

SEQ ID NO: 1516 - protein, 33 aa, Artificial Sequence
  Description of Artificial Sequence: Synthetic peptide
  MOD_RES (6)..(6): Any L- or D-natural amino acid and any non-natural amino acid; see specification as filed for detailed description of substitutions, R-groups and preferred embodiments
  MOD_RES (8)..(10): Any L- or D-natural amino acid and any non-natural amino acid; see specification as filed for detailed description of substitutions, R-groups and preferred embodiments
  MOD_RES (15)..(18): Any L- or D-natural or non-natural amino acid, and this range may encompass 1 or 4 residues; see specification as filed for detailed description of substitutions, R-groups and preferred embodiments
  c-term may be amidated
ILPIAXSXXXEVSHXXXXAHQGKHETYGHKTPY

SEQ ID NO: 1517 - protein, 33 aa, Artificial Sequence
  Description of Artificial Sequence: Synthetic peptide
  MOD_RES (7)..(10): Any L- or D-natural amino acid and any non-natural amino acid; see specification as filed for detailed description of substitutions, R-groups and preferred embodiments
  MOD_RES (15)..(18): Any L- or D-natural or non-natural amino acid, and this range may encompass 1 or 4 residues; see specification as filed for detailed description of substitutions, R-groups and preferred embodiments
  c-term may be amidated
ILPIASXXXXEVSHXXXXAHQGKHETYGHKTPY

SEQ ID NO: 1518 - protein, 33 aa, Artificial Sequence
  Description of Artificial Sequence: Synthetic peptide
  MOD_RES (1)..(1): Any L- or D-natural amino acid and any non-natural amino acid; see specification as filed for detailed description of substitutions, R-groups and preferred embodiments
  MOD_RES (8)..(9): Any L- or D-natural amino acid and any non-natural amino acid; see specification as filed for detailed description of substitutions, R-groups and preferred embodiments
  MOD_RES (11)..(11): Any L- or D-natural amino acid and any non-natural amino acid; see specification as filed for detailed description of substitutions, R-groups and preferred embodiments
  MOD_RES (15)..(18): Any L- or D-natural or non-natural amino acid, and this range may encompass 1 or 4 residues; see specification as filed for detailed description of substitutions, R-groups and preferred embodiments
  c-term may be amidated
XLPIASSXXTXVSHXXXXAHQGKHETYGHKTPY

SEQ ID NO: 1519 - protein, 33 aa, Artificial Sequence
  Description of Artificial Sequence: Synthetic peptide
  MOD_RES (2)..(2): Any L- or D-natural amino acid and any non-natural amino acid; see specification as filed for detailed description of substitutions, R-groups and preferred embodiments
  MOD_RES (8)..(9): Any L- or D-natural amino acid and any non-natural amino acid; see specification as filed for detailed description of substitutions, R-groups and preferred embodiments
  MOD_RES (11)..(11): Any L- or D-natural amino acid and any non-natural amino acid; see specification as filed for detailed description of substitutions, R-groups and preferred embodiments
  MOD_RES (15)..(18): Any L- or D-natural or non-natural amino acid, and this range may encompass 1 or 4 residues; see specification as filed for detailed description of substitutions, R-groups and preferred embodiments
  c-term may be amidated
IXPIASSXXTXVSHXXXXAHQGKHETYGHKTPY

SEQ ID NO: 1520 - protein, 33 aa, Artificial Sequence
  Description of Artificial Sequence: Synthetic peptide
  MOD_RES (3)..(3): Any L- or D-natural amino acid and any non-natural amino acid; see specification as filed for detailed description of substitutions, R-groups and preferred embodiments
  MOD_RES (8)..(9): Any L- or D-natural amino acid and any non-natural amino acid; see specification as filed for detailed description of substitutions, R-groups and preferred embodiments
  MOD_RES (11)..(11): Any L- or D-natural amino acid and any non-natural amino acid; see specification as filed for detailed description of substitutions, R-groups and preferred embodiments
  MOD_RES (15)..(18): Any L- or D-natural or non-natural amino acid, and this range may encompass 1 or 4 residues; see specification as filed for detailed description of substitutions, R-groups and preferred embodiments
  c-term may be amidated
ILXIASSXXTXVSHXXXXAHQGKHETYGHKTPY

SEQ ID NO: 1521 - protein, 33 aa, Artificial Sequence
  Description of Artificial Sequence: Synthetic peptide
  MOD_RES (4)..(4): Any L- or D-natural amino acid and any non-natural amino acid; see specification as filed for detailed description of substitutions, R-groups and preferred embodiments
  MOD_RES (8)..(9): Any L- or D-natural amino acid and any non-natural amino acid; see specification as filed for detailed description of substitutions, R-groups and preferred embodiments
  MOD_RES (11)..(11): Any L- or D-natural amino acid and any non-natural amino acid; see specification as filed for detailed description of substitutions, R-groups and preferred embodiments
  MOD_RES (15)..(18): Any L- or D-natural or non-natural amino acid, and this range may encompass 1 or 4 residues; see specification as filed for detailed description of substitutions, R-groups and preferred embodiments
  c-term may be amidated
ILPXASSXXTXVSHXXXXAHQGKHETYGHKTPY

SEQ ID NO: 1522 - protein, 33 aa, Artificial Sequence
  Description of Artificial Sequence: Synthetic peptide
  MOD_RES (5)..(5): Any L- or D-natural amino acid and any non-natural amino acid; see specification as filed for detailed description of substitutions, R-groups and preferred embodiments
  MOD_RES (8)..(9): Any L- or D-natural amino acid and any non-natural amino acid; see specification as filed for detailed description of substitutions, R-groups and preferred embodiments
  MOD_RES (11)..(11): Any L- or D-natural amino acid and any non-natural amino acid; see specification as filed for detailed description of substitutions, R-groups and preferred embodiments
  MOD_RES (15)..(18): Any L- or D-natural or non-natural amino acid, and this range may encompass 1 or 4 residues; see specification as filed for detailed description of substitutions, R-groups and preferred embodiments
  c-term may be amidated
ILPIXSSXXTXVSHXXXXAHQGKHETYGHKTPY

SEQ ID NO: 1523 - protein, 33 aa, Artificial Sequence
  Description of Artificial Sequence: Synthetic peptide
  MOD_RES (6)..(6): Any L- or D-natural amino acid and any non-natural amino acid; see specification as filed for detailed description of substitutions, R-groups and preferred embodiments
  MOD_RES (8)..(9): Any L- or D-natural amino acid and any non-natural amino acid; see specification as filed for detailed description of substitutions, R-groups and preferred embodiments
  MOD_RES (11)..(11): Any L- or D-natural amino acid and any non-natural amino acid; see specification as filed for detailed description of substitutions, R-groups and preferred embodiments
  MOD_RES (15)..(18): Any L- or D-natural or non-natural amino acid, and this range may encompass 1 or 4 residues; see specification as filed for detailed description of substitutions, R-groups and preferred embodiments
  c-term may be amidated
ILPIAXSXXTXVSHXXXXAHQGKHETYGHKTPY

SEQ ID NO: 1524 - protein, 33 aa, Artificial Sequence
  Description of Artificial Sequence: Synthetic peptide
  MOD_RES (7)..(9): Any L- or D-natural amino acid and any non-natural amino acid; see specification as filed for detailed description of substitutions, R-groups and preferred embodiments
  MOD_RES (11)..(11): Any L- or D-natural amino acid and any non-natural amino acid; see specification as filed for detailed description of substitutions, R-groups and preferred embodiments
  MOD_RES (15)..(18): Any L- or D-natural or non-natural amino acid, and this range may encompass 1 or 4 residues; see specification as filed for detailed description of substitutions, R-groups and preferred embodiments
  c-term may be amidated
ILPIASXXXTXVSHXXXXAHQGKHETYGHKTPY

SEQ ID NO: 1525 - protein, 33 aa, Artificial Sequence
  Description of Artificial Sequence: Synthetic peptide
  MOD_RES (1)..(1): Any L- or D-natural amino acid and any non-natural amino acid; see specification as filed for detailed description of substitutions, R-groups and preferred embodiments
  MOD_RES (8)..(9): Any L- or D-natural amino acid and any non-natural amino acid; see specification as filed for detailed description of substitutions, R-groups and preferred embodiments
  MOD_RES (12)..(12): Any L- or D-natural amino acid and any non-natural amino acid; see specification as filed for detailed description of substitutions, R-groups and preferred embodiments
  MOD_RES (15)..(18): Any L- or D-natural or non-natural amino acid, and this range may encompass 1 or 4 residues; see specification as filed for detailed description of substitutions, R-groups and preferred embodiments
  c-term may be amidated
XLPIASSXXTEXSHXXXXAHQGKHETYGHKTPY

SEQ ID NO: 1526 - protein, 33 aa, Artificial Sequence
  Description of Artificial Sequence: Synthetic peptide
  MOD_RES (2)..(2): Any L- or D-natural amino acid and any non-natural amino acid; see specification as filed for detailed description of substitutions, R-groups and preferred embodiments
  MOD_RES (8)..(9): Any L- or D-natural amino acid and any non-natural amino acid; see specification as filed for detailed description of substitutions, R-groups and preferred embodiments
  MOD_RES (12)..(12): Any L- or D-natural amino acid and any non-natural amino acid; see specification as filed for detailed description of substitutions, R-groups and preferred embodiments
  MOD_RES (15)..(18): Any L- or D-natural or non-natural amino acid, and this range may encompass 1 or 4 residues; see specification as filed for detailed description of substitutions, R-groups and preferred embodiments
  c-term may be amidated
IXPIASSXXTEXSHXXXXAHQGKHETYGHKTPY

SEQ ID NO: 1527 - protein, 33 aa, Artificial Sequence
  Description of Artificial Sequence: Synthetic peptide
  MOD_RES (3)..(3): Any L- or D-natural amino acid and any non-natural amino acid; see specification as filed for detailed description of substitutions, R-groups and preferred embodiments
  MOD_RES (8)..(9): Any L- or D-natural amino acid and any non-natural amino acid; see specification as filed for detailed description of substitutions, R-groups and preferred embodiments
  MOD_RES (12)..(12): Any L- or D-natural amino acid and any non-natural amino acid; see specification as filed for detailed description of substitutions, R-groups and preferred embodiments
  MOD_RES (15)..(18): Any L- or D-natural or non-natural amino acid, and this range may encompass 1 or 4 residues; see specification as filed for detailed description of substitutions, R-groups and preferred embodiments
  c-term may be amidated
ILXIASSXXTEXSHXXXXAHQGKHETYGHKTPY

SEQ ID NO: 1528 - protein, 33 aa, Artificial Sequence
  Description of Artificial Sequence: Synthetic peptide
  MOD_RES (4)..(4): Any L- or D-natural amino acid and any non-natural amino acid; see specification as filed for detailed description of substitutions, R-groups and preferred embodiments
  MOD_RES (8)..(9): Any L- or D-natural amino acid and any non-natural amino acid; see specification as filed for detailed description of substitutions, R-groups and preferred embodiments
  MOD_RES (12)..(12): Any L- or D-natural amino acid and any non-natural amino acid; see specification as filed for detailed description of substitutions, R-groups and preferred embodiments
  MOD_RES (15)..(18): Any L- or D-natural or non-natural amino acid, and this range may encompass 1 or 4 residues; see specification as filed for detailed description of substitutions, R-groups and preferred embodiments
  c-term may be amidated
ILPXASSXXTEXSHXXXXAHQGKHETYGHKTPY

SEQ ID NO: 1529 - protein, 33 aa, Artificial Sequence
  Description of Artificial Sequence: Synthetic peptide
  MOD_RES (5)..(5): Any L- or D-natural amino acid and any non-natural amino acid; see specification as filed for detailed description of substitutions, R-groups and preferred embodiments
  MOD_RES (8)..(9): Any L- or D-natural amino acid and any non-natural amino acid; see specification as filed for detailed description of substitutions, R-groups and preferred embodiments
  MOD_RES (12)..(12): Any L- or D-natural amino acid and any non-natural amino acid; see specification as filed for detailed description of substitutions, R-groups and preferred embodiments
  MOD_RES (15)..(18): Any L- or D-natural or non-natural amino acid, and this range may encompass 1 or 4 residues; see specification as filed for detailed description of substitutions, R-groups and preferred embodiments
  c-term may be amidated
ILPIXSSXXTEXSHXXXXAHQGKHETYGHKTPY

SEQ ID NO: 1530 - protein, 33 aa, Artificial Sequence
  Description of Artificial Sequence: Synthetic peptide
  MOD_RES (6)..(6): Any L- or D-natural amino acid and any non-natural amino acid; see specification as filed for detailed description of substitutions, R-groups and preferred embodiments
  MOD_RES (8)..(9): Any L- or D-natural amino acid and any non-natural amino acid; see specification as filed for detailed description of substitutions, R-groups and preferred embodiments
  MOD_RES (12)..(12): Any L- or D-natural amino acid and any non-natural amino acid; see specification as filed for detailed description of substitutions, R-groups and preferred embodiments
  MOD_RES (15)..(18): Any L- or D-natural or non-natural amino acid, and this range may encompass 1 or 4 residues; see specification as filed for detailed description of substitutions, R-groups and preferred embodiments
  c-term may be amidated
ILPIAXSXXTEXSHXXXXAHQGKHETYGHKTPY

SEQ ID NO: 1531 - protein, 33 aa, Artificial Sequence
  Description of Artificial Sequence: Synthetic peptide
  MOD_RES (7)..(9): Any L- or D-natural amino acid and any non-natural amino acid; see specification as filed for detailed description of substitutions, R-groups and preferred embodiments
  MOD_RES (12)..(12): Any L- or D-natural amino acid and any non-natural amino acid; see specification as filed for detailed description of substitutions, R-groups and preferred embodiments
  MOD_RES (15)..(18): Any L- or D-natural or non-natural amino acid, and this range may encompass 1 or 4 residues; see specification as filed for detailed description of substitutions, R-groups and preferred embodiments
  c-term may be amidated
ILPIASXXXTEXSHXXXXAHQGKHETYGHKTPY

SEQ ID NO: 1532 - protein, 33 aa, Artificial Sequence
  Description of Artificial Sequence: Synthetic peptide
  MOD_RES (1)..(1): Any L- or D-natural amino acid and any non-natural amino acid; see specification as filed for detailed description of substitutions, R-groups and preferred embodiments
  MOD_RES (8)..(9): Any L- or D-natural amino acid and any non-natural amino acid; see specification as filed for detailed description of substitutions, R-groups and preferred embodiments
  MOD_RES (13)..(13): Any L- or D-natural amino acid and any non-natural amino acid; see specification as filed for detailed description of substitutions, R-groups and preferred embodiments
  MOD_RES (15)..(18): Any L- or D-natural or non-natural amino acid, and this range may encompass 1 or 4 residues; see specification as filed for detailed description of substitutions, R-groups and preferred embodiments
  c-term may be amidated
XLPIASSXXTEVXHXXXXAHQGKHETYGHKTPY

SEQ ID NO: 1533 - protein, 33 aa, Artificial Sequence
  Description of Artificial Sequence: Synthetic peptide
  MOD_RES (2)..(2): Any L- or D-natural amino acid and any non-natural amino acid; see specification as filed for detailed description of substitutions, R-groups and preferred embodiments
  MOD_RES (8)..(9): Any L- or D-natural amino acid and any non-natural amino acid; see specification as filed for detailed description of substitutions, R-groups and preferred embodiments
  MOD_RES (13)..(13): Any L- or D-natural amino acid and any non-natural amino acid; see specification as filed for detailed description of substitutions, R-groups and preferred embodiments
  MOD_RES (15)..(18): Any L- or D-natural or non-natural amino acid, and this range may encompass 1 or 4 residues; see specification as filed for detailed description of substitutions, R-groups and preferred embodiments
  c-term may be amidated
IXPIASSXXTEVXHXXXXAHQGKHETYGHKTPY

SEQ ID NO: 1534 - protein, 33 aa, Artificial Sequence
  Description of Artificial Sequence: Synthetic peptide
  MOD_RES (3)..(3): Any L- or D-natural amino acid and any non-natural amino acid; see specification as filed for detailed description of substitutions, R-groups and preferred embodiments
  MOD_RES (8)..(9): Any L- or D-natural amino acid and any non-natural amino acid; see specification as filed for detailed description of substitutions, R-groups and preferred embodiments
  MOD_RES (13)..(13): Any L- or D-natural amino acid and any non-natural amino acid; see specification as filed for detailed description of substitutions, R-groups and preferred embodiments
  MOD_RES (15)..(18): Any L- or D-natural or non-natural amino acid, and this range may encompass 1 or 4 residues; see specification as filed for detailed description of substitutions, R-groups and preferred embodiments
  c-term may be amidated
ILXIASSXXTEVXHXXXXAHQGKHETYGHKTPY

SEQ ID NO: 1535 - protein, 33 aa, Artificial Sequence
  Description of Artificial Sequence: Synthetic peptide
  MOD_RES (4)..(4): Any L- or D-natural amino acid and any non-natural amino acid; see specification as filed for detailed description of substitutions, R-groups and preferred embodiments
  MOD_RES (8)..(9): Any L- or D-natural amino acid and any non-natural amino acid; see specification as filed for detailed description of substitutions, R-groups and preferred embodiments
  MOD_RES (13)..(13): Any L- or D-natural amino acid and any non-natural amino acid; see specification as filed for detailed description of substitutions, R-groups and preferred embodiments
  MOD_RES (15)..(18): Any L- or D-natural or non-natural amino acid, and this range may encompass 1 or 4 residues; see specification as filed for detailed description of substitutions, R-groups and preferred embodiments
  c-term may be amidated
ILPXASSXXTEVXHXXXXAHQGKHETYGHKTPY

SEQ ID NO: 1536 - protein, 33 aa, Artificial Sequence
  Description of Artificial Sequence: Synthetic peptide
  MOD_RES (5)..(5): Any L- or D-natural amino acid and any non-natural amino acid; see specification as filed for detailed description of substitutions, R-groups and preferred embodiments
  MOD_RES (8)..(9): Any L- or D-natural amino acid and any non-natural amino acid; see specification as filed for detailed description of substitutions, R-groups and preferred embodiments
  MOD_RES (13)..(13): Any L- or D-natural amino acid and any non-natural amino acid; see specification as filed for detailed description of substitutions, R-groups and preferred embodiments
  MOD_RES (15)..(18): Any L- or D-natural or non-natural amino acid, and this range may encompass 1 or 4 residues; see specification as filed for detailed description of substitutions, R-groups and preferred embodiments
  c-term may be amidated
ILPIXSSXXTEVXHXXXXAHQGKHETYGHKTPY

SEQ ID NO: 1537 - protein, 33 aa, Artificial Sequence
  Description of Artificial Sequence: Synthetic peptide
  MOD_RES (6)..(6): Any L- or D-natural amino acid and any non-natural amino acid; see specification as filed for detailed description of substitutions, R-groups and preferred embodiments
  MOD_RES (8)..(9): Any L- or D-natural amino acid and any non-natural amino acid; see specification as filed for detailed description of substitutions, R-groups and preferred embodiments
  MOD_RES (13)..(13): Any L- or D-natural amino acid and any non-natural amino acid; see specification as filed for detailed description of substitutions, R-groups and preferred embodiments
  MOD_RES (15)..(18): Any L- or D-natural or non-natural amino acid, and this range may encompass 1 or 4 residues; see specification as filed for detailed description of substitutions, R-groups and preferred embodiments
  c-term may be amidated
ILPIAXSXXTEVXHXXXXAHQGKHETYGHKTPY

SEQ ID NO: 1538 - protein, 33 aa, Artificial Sequence
  Description of Artificial Sequence: Synthetic peptide
  MOD_RES (7)..(9): Any L- or D-natural amino acid and any non-natural amino acid; see specification as filed for detailed description of substitutions, R-groups and preferred embodiments
  MOD_RES (13)..(13): Any L- or D-natural amino acid and any non-natural amino acid; see specification as filed for detailed description of substitutions, R-groups and preferred embodiments
  MOD_RES (15)..(18): Any L- or D-natural or non-natural amino acid, and this range may encompass 1 or 4 residues; see specification as filed for detailed description of substitutions, R-groups and preferred embodiments
  c-term may be amidated
ILPIASXXXTEVXHXXXXAHQGKHETYGHKTPY

SEQ ID NO: 1539 - protein, 33 aa, Artificial Sequence
  Description of Artificial Sequence: Synthetic peptide
  MOD_RES (1)..(1): Any L- or D-natural amino acid and any non-natural amino acid; see specification as filed for detailed description of substitutions, R-groups and preferred embodiments
  MOD_RES (8)..(9): Any L- or D-natural amino acid and any non-natural amino acid; see specification as filed for detailed description of substitutions, R-groups and preferred embodiments
  MOD_RES (14)..(14): Any L- or D-natural amino acid and any non-natural amino acid; see specification as filed for detailed description of substitutions, R-groups and preferred embodiments
  MOD_RES (15)..(18): Any L- or D-natural or non-natural amino acid, and this range may encompass 1 or 4 residues; see specification as filed for detailed description of substitutions, R-groups and preferred embodiments
  c-term may be amidated
XLPIASSXXTEVSXXXXXAHQGKHETYGHKTPY

SEQ ID NO: 1540 - protein, 33 aa, Artificial Sequence
  Description of Artificial Sequence: Synthetic peptide
  MOD_RES (2)..(2): Any L- or D-natural amino acid and any non-natural amino acid; see specification as filed for detailed description of substitutions, R-groups and preferred embodiments
  MOD_RES (8)..(9): Any L- or D-natural amino acid and any non-natural amino acid; see specification as filed for detailed description of substitutions, R-groups and preferred embodiments
  MOD_RES (14)..(14): Any L- or D-natural amino acid and any non-natural amino acid; see specification as filed for detailed description of substitutions, R-groups and preferred embodiments
  MOD_RES (15)..(18): Any L- or D-natural or non-natural amino acid, and this range may encompass 1 or 4 residues; see specification as filed for detailed description of substitutions, R-groups and preferred embodiments
  c-term may be amidated
IXPIASSXXTEVSXXXXXAHQGKHETYGHKTPY

SEQ ID NO: 1541 - protein, 33 aa, Artificial Sequence
  Description of Artificial Sequence: Synthetic peptide
  MOD_RES (3)..(3): Any L- or D-natural amino acid and any non-natural amino acid; see specification as filed for detailed description of substitutions, R-groups and preferred embodiments
  MOD_RES (8)..(9): Any L- or D-natural amino acid and any non-natural amino acid; see specification as filed for detailed description of substitutions, R-groups and preferred embodiments
  MOD_RES (14)..(14): Any L- or D-natural amino acid and any non-natural amino acid; see specification as filed for detailed description of substitutions, R-groups and preferred embodiments
  MOD_RES (15)..(18): Any L- or D-natural or non-natural amino acid, and this range may encompass 1 or 4 residues; see specification as filed for detailed description of substitutions, R-groups and preferred embodiments
  c-term may be amidated
ILXIASSXXTEVSXXXXXAHQGKHETYGHKTPY

SEQ ID NO: 1542 - protein, 33 aa, Artificial Sequence
  Description of Artificial Sequence: Synthetic peptide
  MOD_RES (4)..(4): Any L- or D-natural amino acid and any non-natural amino acid; see specification as filed for detailed description of substitutions, R-groups and preferred embodiments
  MOD_RES (8)..(9): Any L- or D-natural amino acid and any non-natural amino acid; see specification as filed for detailed description of substitutions, R-groups and preferred embodiments
  MOD_RES (14)..(14): Any L- or D-natural amino acid and any non-natural amino acid; see specification as filed for detailed description of substitutions, R-groups and preferred embodiments
  MOD_RES (15)..(18): Any L- or D-natural or non-natural amino acid, and this range may encompass 1 or 4 residues; see specification as filed for detailed description of substitutions, R-groups and preferred embodiments
  c-term may be amidated
ILPXASSXXTEVSXXXXXAHQGKHETYGHKTPY

SEQ ID NO: 1543 - protein, 33 aa, Artificial Sequence
  Description of Artificial Sequence: Synthetic peptide
  MOD_RES (5)..(5): Any L- or D-natural amino acid and any non-natural amino acid; see specification as filed for detailed description of substitutions, R-groups and preferred embodiments
  MOD_RES (8)..(9): Any L- or D-natural amino acid and any non-natural amino acid; see specification as filed for detailed description of substitutions, R-groups and preferred embodiments
  MOD_RES (14)..(14): Any L- or D-natural amino acid and any non-natural amino acid; see specification as filed for detailed description of substitutions, R-groups and preferred embodiments
  MOD_RES (15)..(18): Any L- or D-natural or non-natural amino acid, and this range may encompass 1 or 4 residues; see specification as filed for detailed description of substitutions, R-groups and preferred embodiments
  c-term may be amidated
ILPIXSSXXTEVSXXXXXAHQGKHETYGHKTPY

SEQ ID NO: 1544 - protein, 33 aa, Artificial Sequence
  Description of Artificial Sequence: Synthetic peptide
  MOD_RES (6)..(6): Any L- or D-natural amino acid and any non-natural amino acid; see specification as filed for detailed description of substitutions, R-groups and preferred embodiments
  MOD_RES (8)..(9): Any L- or D-natural amino acid and any non-natural amino acid; see specification as filed for detailed description of substitutions, R-groups and preferred embodiments
  MOD_RES (14)..(14): Any L- or D-natural amino acid and any non-natural amino acid; see specification as filed for detailed description of substitutions, R-groups and preferred embodiments
  MOD_RES (15)..(18): Any L- or D-natural or non-natural amino acid, and this range may encompass 1 or 4 residues; see specification as filed for detailed description of substitutions, R-groups and preferred embodiments
  c-term may be amidated
ILPIAXSXXTEVSXXXXXAHQGKHETYGHKTPY

SEQ ID NO: 1545 - protein, 33 aa, Artificial Sequence
  Description of Artificial Sequence: Synthetic peptide
  MOD_RES (7)..(9): Any L- or D-natural amino acid and any non-natural amino acid; see specification as filed for detailed description of substitutions, R-groups and preferred embodiments
  MOD_RES (14)..(14): Any L- or D-natural amino acid and any non-natural amino acid; see specification as filed for detailed description of substitutions, R-groups and preferred embodiments
  MOD_RES (15)..(18): Any L- or D-natural or non-natural amino acid, and this range may encompass 1 or 4 residues; see specification as filed for detailed description of substitutions, R-groups and preferred embodiments
  c-term may be amidated
ILPIASXXXTEVSXXXXXAHQGKHETYGHKTPY

SEQ ID NO: 1546 - protein, 32 aa, Artificial Sequence; identical to SEQ ID NO: 1461
  Description of Artificial Sequence: Synthetic peptide
  MOD_RES (15)..(18): Any L- or D-natural or non-natural amino acid, and this range may encompass 1 or 4 residues; see specification as filed for detailed description of substitutions, R-groups and preferred embodiments
  c-term may be amidated

SEQ ID NO: 1547 - protein, 32 aa, Artificial Sequence; identical to SEQ ID NO: 1462
  Description of Artificial Sequence: Synthetic peptide
  MOD_RES (1)..(1): Any L- or D-natural amino acid and any non-natural amino acid; see specification as filed for detailed description of substitutions, R-groups and preferred embodiments
  MOD_RES (8)..(9): Any L- or D-natural amino acid and any non-natural amino acid; see specification as filed for detailed description of substitutions, R-groups and preferred embodiments
  MOD_RES (15)..(18): Any L- or D-natural or non-natural amino acid, and this range may encompass 1 or 4 residues; see specification as filed for detailed description of substitutions, R-groups and preferred embodiments
  c-term may be amidated

SEQ ID NO: 1548 - protein, 32 aa, Artificial Sequence; identical to SEQ ID NO: 1463
  Description of Artificial Sequence: Synthetic peptide
  MOD_RES (2)..(2): Any L- or D-natural amino acid and any non-natural amino acid; see specification as filed for detailed description of substitutions, R-groups and preferred embodiments
  MOD_RES (8)..(9): Any L- or D-natural amino acid and any non-natural amino acid; see specification as filed for detailed description of substitutions, R-groups and preferred embodiments
  MOD_RES (15)..(18): Any L- or D-natural or non-natural amino acid, and this range may encompass 1 or 4 residues; see specification as filed for detailed description of substitutions, R-groups and preferred embodiments
  c-term may be amidated

SEQ ID NO: 1549 - protein, 32 aa, Artificial Sequence; identical to SEQ ID NO: 1464
  Description of Artificial Sequence: Synthetic peptide
  MOD_RES (3)..(3): Any L- or D-natural amino acid and any non-natural amino acid; see specification as filed for detailed description of substitutions, R-groups and preferred embodiments
  MOD_RES (8)..(9): Any L- or D-natural amino acid and any non-natural amino acid; see specification as filed for detailed description of substitutions, R-groups and preferred embodiments
  MOD_RES (15)..(18): Any L- or D-natural or non-natural amino acid, and this range may encompass 1 or 4 residues; see specification as filed for detailed description of substitutions, R-groups and preferred embodiments
  c-term may be amidated

SEQ ID NO: 1550 - protein, 32 aa, Artificial Sequence; identical to SEQ ID NO: 1465
  Description of Artificial Sequence: Synthetic peptide
  MOD_RES (4)..(4): Any L- or D-natural amino acid and any non-natural amino acid; see specification as filed for detailed description of substitutions, R-groups and preferred embodiments
  MOD_RES (8)..(9): Any L- or D-natural amino acid and any non-natural amino acid; see specification as filed for detailed description of substitutions, R-groups and preferred embodiments
  MOD_RES (15)..(18): Any L- or D-natural or non-natural amino acid, and this range may encompass 1 or 4 residues; see specification as filed for detailed description of substitutions, R-groups and preferred embodiments
  c-term may be amidated

SEQ ID NO: 1551 - protein, 32 aa, Artificial Sequence; identical to SEQ ID NO: 1466
  Description of Artificial Sequence: Synthetic peptide
  MOD_RES (5)..(5): Any L- or D-natural amino acid and any non-natural amino acid; see specification as filed for detailed description of substitutions, R-groups and preferred embodiments
  MOD_RES (8)..(9): Any L- or D-natural amino acid and any non-natural amino acid; see specification as filed for detailed description of substitutions, R-groups and preferred embodiments
  MOD_RES (15)..(18): Any L- or D-natural or non-natural amino acid, and this range may encompass 1 or 4 residues; see specification as filed for detailed description of substitutions, R-groups and preferred embodiments
  c-term may be amidated

SEQ ID NO: 1552 - protein, 32 aa, Artificial Sequence; identical to SEQ ID NO: 1467
  Description of Artificial Sequence: Synthetic peptide
  MOD_RES (6)..(6): Any L- or D-natural amino acid and any non-natural amino acid; see specification as filed for detailed description of substitutions, R-groups and preferred embodiments
  MOD_RES (8)..(9): Any L- or D-natural amino acid and any non-natural amino acid; see specification as filed for detailed description of substitutions, R-groups and preferred embodiments
  MOD_RES (15)..(18): Any L- or D-natural or non-natural amino acid, and this range may encompass 1 or 4 residues; see specification as filed for detailed description of substitutions, R-groups and preferred embodiments
  c-term may be amidated

SEQ ID NO: 1553 - protein, 32 aa, Artificial Sequence; identical to SEQ ID NO: 1468
  Description of Artificial Sequence: Synthetic peptide
  MOD_RES (7)..(9): Any L- or D-natural amino acid and any non-natural amino acid; see specification as filed for detailed description of substitutions, R-groups and preferred embodiments
  MOD_RES (15)..(18): Any L- or D-natural or non-natural amino acid, and this range may encompass 1 or 4 residues; see specification as filed for detailed description of substitutions, R-groups and preferred embodiments
  c-term may be amidated

SEQ ID NO: 1554 - protein, 32 aa, Artificial Sequence; identical to SEQ ID NO: 1469
  Description of Artificial Sequence: Synthetic peptide
  MOD_RES (1)..(1): Any L- or D-natural amino acid and any non-natural amino acid; see specification as filed for detailed description of substitutions, R-groups and preferred embodiments
  MOD_RES (8)..(10): Any L- or D-natural amino acid and any non-natural amino acid; see specification as filed for detailed description of substitutions, R-groups and preferred embodiments
  MOD_RES (15)..(18): Any L- or D-natural or non-natural amino acid, and this range may encompass 1 or 4 residues; see specification as filed for detailed description of substitutions, R-groups and preferred embodiments
  c-term may be amidated

SEQ ID NO: 1555 - protein, 32 aa, Artificial Sequence; identical to SEQ ID NO: 1470
  Description of Artificial Sequence: Synthetic peptide
  MOD_RES (2)..(2): Any L- or D-natural amino acid and any non-natural amino acid; see specification as filed for detailed description of substitutions, R-groups and preferred embodiments
  MOD_RES (8)..(10): Any L- or D-natural amino acid and any non-natural amino acid; see specification as filed for detailed description of substitutions, R-groups and preferred embodiments
  MOD_RES (15)..(18): Any L- or D-natural or non-natural amino acid, and this range may encompass 1 or 4 residues; see specification as filed for detailed description of substitutions, R-groups and preferred embodiments
  c-term may be amidated

SEQ ID NO: 1556 - protein, 32 aa, Artificial Sequence; identical to SEQ ID NO: 1471
  Description of Artificial Sequence: Synthetic peptide
  MOD_RES (3)..(3): Any L- or D-natural amino acid and any non-natural amino acid; see specification as filed for detailed description of substitutions, R-groups and preferred embodiments
  MOD_RES (8)..(10): Any L- or D-natural amino acid and any non-natural amino acid; see specification as filed for detailed description of substitutions, R-groups and preferred embodiments
  MOD_RES (15)..(18): Any L- or D-natural or non-natural amino acid, and this range may encompass 1 or 4 residues; see specification as filed for detailed description of substitutions, R-groups and preferred embodiments
  c-term may be amidated

SEQ ID NO: 1557 - protein, 32 aa, Artificial Sequence; identical to SEQ ID NO: 1472
  Description of Artificial Sequence: Synthetic peptide
  MOD_RES (4)..(4): Any L- or D-natural amino acid and any non-natural amino acid; see specification as filed for detailed description of substitutions, R-groups and preferred embodiments
  MOD_RES (8)..(10): Any L- or D-natural amino acid and any non-natural amino acid; see specification as filed for detailed description of substitutions, R-groups and preferred embodiments
  MOD_RES (15)..(18): Any L- or D-natural or non-natural amino acid, and this range may encompass 1 or 4 residues; see specification as filed for detailed description of substitutions, R-groups and preferred embodiments
  c-term may be amidated

SEQ ID NO: 1558 - protein, 32 aa, Artificial Sequence; identical to SEQ ID NO: 1473
  Description of Artificial Sequence: Synthetic peptide
  MOD_RES (5)..(5): Any L- or D-natural amino acid and any non-natural amino acid; see specification as filed for detailed description of substitutions, R-groups and preferred embodiments
  MOD_RES (8)..(10): Any L- or D-natural amino acid and any non-natural amino acid; see specification as filed for detailed description of substitutions, R-groups and preferred embodiments
  MOD_RES (15)..(18): Any L- or D-natural or non-natural amino acid, and this range may encompass 1 or 4 residues; see specification as filed for detailed description of substitutions, R-groups and preferred embodiments
  c-term may be amidated

SEQ ID NO: 1559 - protein, 32 aa, Artificial Sequence; identical to SEQ ID NO: 1474
  Description of Artificial Sequence: Synthetic peptide
  MOD_RES (6)..(6): Any L- or D-natural amino acid and any non-natural amino acid; see specification as filed for detailed description of substitutions, R-groups and preferred embodiments
  MOD_RES (8)..(10): Any L- or D-natural amino acid and any non-natural amino acid; see specification as filed for detailed description of substitutions, R-groups and preferred embodiments
  MOD_RES (15)..(18): Any L- or D-natural or non-natural amino acid, and this range may encompass 1 or 4 residues; see specification as filed for detailed description of substitutions, R-groups and preferred embodiments
  c-term may be amidated

SEQ ID NO: 1560 - protein, 32 aa, Artificial Sequence; identical to SEQ ID NO: 1475
  Description of Artificial Sequence: Synthetic peptide
  MOD_RES (7)..(10): Any L- or D-natural amino acid and any non-natural amino acid; see specification as filed for detailed description of substitutions, R-groups and preferred embodiments
  MOD_RES (15)..(18): Any L- or D-natural or non-natural amino acid, and this range may encompass 1 or 4 residues; see specification as filed for detailed description of substitutions, R-groups and preferred embodiments
  c-term may be amidated

SEQ ID NO: 1561 - protein, 32 aa, Artificial Sequence; identical to SEQ ID NO: 1476
  Description of Artificial Sequence: Synthetic peptide
  MOD_RES (1)..(1): Any L- or D-natural amino acid and any non-natural amino acid; see specification as filed for detailed description of substitutions, R-groups and preferred embodiments
  MOD_RES (8)..(9): Any L- or D-natural amino acid and any non-natural amino acid; see specification as filed for detailed description of substitutions, R-groups and preferred embodiments
  MOD_RES (11)..(11): Any L- or D-natural amino acid and any non-natural amino acid; see specification as filed for detailed description of substitutions, R-groups and preferred embodiments
  MOD_RES (15)..(18): Any L- or D-natural or non-natural amino acid, and this range may encompass 1 or 4 residues; see specification as filed for detailed description of substitutions, R-groups and preferred embodiments
  c-term may be amidated

SEQ ID NO: 1562 - protein, 32 aa, Artificial Sequence; identical to SEQ ID NO: 1477
  Description of Artificial Sequence: Synthetic peptide
  MOD_RES (2)..(2): Any L- or D-natural amino acid and any non-natural amino acid; see specification as filed for detailed description of substitutions, R-groups and preferred embodiments
  MOD_RES (8)..(9): Any L- or D-natural amino acid and any non-natural amino acid; see specification as filed for detailed description of substitutions, R-groups and preferred embodiments
  MOD_RES (11)..(11): Any L- or D-natural amino acid and any non-natural amino acid; see specification as filed for detailed description of substitutions, R-groups and preferred embodiments
  MOD_RES (15)..(18): Any L- or D-natural or non-natural amino acid, and this range may encompass 1 or 4 residues; see specification as filed for detailed description of substitutions, R-groups and preferred embodiments
  c-term may be amidated

SEQ ID NO: 1563 - protein, 32 aa, Artificial Sequence; identical to SEQ ID NO: 1478
  Description of Artificial Sequence: Synthetic peptide
  MOD_RES (3)..(3): Any L- or D-natural amino acid and any non-natural amino acid; see specification as filed for detailed description of substitutions, R-groups and preferred embodiments
  MOD_RES (8)..(9): Any L- or D-natural amino acid and any non-natural amino acid; see specification as filed for detailed description of substitutions, R-groups and preferred embodiments
  MOD_RES (11)..(11): Any L- or D-natural amino acid and any non-natural amino acid; see specification as filed for detailed description of substitutions, R-groups and preferred embodiments
  MOD_RES (15)..(18): Any L- or D-natural or non-natural amino acid, and this range may encompass 1 or 4 residues; see specification as filed for detailed description of substitutions, R-groups and preferred embodiments
  c-term may be amidated

SEQ ID NO: 1564 - protein, 32 aa, Artificial Sequence; identical to SEQ ID NO: 1479
  Description of Artificial Sequence: Synthetic peptide
  MOD_RES (4)..(4): Any L- or D-natural amino acid and any non-natural amino acid; see specification as filed for detailed description of substitutions, R-groups and preferred embodiments
  MOD_RES (8)..(9): Any L- or D-natural amino acid and any non-natural amino acid; see specification as filed for detailed description of substitutions, R-groups and preferred embodiments
  MOD_RES (11)..(11): Any L- or D-natural amino acid and any non-natural amino acid; see specification as filed for detailed description of substitutions, R-groups and preferred embodiments
  MOD_RES (15)..(18): Any L- or D-natural or non-natural amino acid, and this range may encompass 1 or 4 residues; see specification as filed for detailed description of substitutions, R-groups and preferred embodiments
  c-term may be amidated

SEQ ID NO: 1565 - protein, 32 aa, Artificial Sequence; identical to SEQ ID NO: 1480
  Description of Artificial Sequence: Synthetic peptide
  MOD_RES (5)..(5): Any L- or D-natural amino acid and any non-natural amino acid; see specification as filed for detailed description of substitutions, R-groups and preferred embodiments
  MOD_RES (8)..(9): Any L- or D-natural amino acid and any non-natural amino acid; see specification as filed for detailed description of substitutions, R-groups and preferred embodiments
  MOD_RES (11)..(11): Any L- or D-natural amino acid and any non-natural amino acid; see specification as filed for detailed description of substitutions, R-groups and preferred embodiments
  MOD_RES (15)..(18): Any L- or D-natural or non-natural amino acid, and this range may encompass 1 or 4 residues; see specification as filed for detailed description of substitutions, R-groups and preferred embodiments
  c-term may be amidated

SEQ ID NO: 1566 - protein, 32 aa, Artificial Sequence; identical to SEQ ID NO: 1481
  Description of Artificial Sequence: Synthetic peptide
  MOD_RES (6)..(6): Any L- or D-natural amino acid and any non-natural amino acid; see specification as filed for detailed description of substitutions, R-groups and preferred embodiments
  MOD_RES (8)..(9): Any L- or D-natural amino acid and any non-natural amino acid; see specification as filed for detailed description of substitutions, R-groups and preferred embodiments
  MOD_RES (11)..(11): Any L- or D-natural amino acid and any non-natural amino acid; see specification as filed for detailed description of substitutions, R-groups and preferred embodiments
  MOD_RES (15)..(18): Any L- or D-natural or non-natural amino acid, and this range may encompass 1 or 4 residues; see specification as filed for detailed description of substitutions, R-groups and preferred embodiments
  c-term may be amidated

SEQ ID NO: 1567 - protein, 32 aa, Artificial Sequence; identical to SEQ ID NO: 1482
  Description of Artificial Sequence: Synthetic peptide
  MOD_RES (7)..(9): Any L- or D-natural amino acid and any non-natural amino acid; see specification as filed for detailed description of substitutions, R-groups and preferred embodiments
  MOD_RES (11)..(11): Any L- or D-natural amino acid and any non-natural amino acid; see specification as filed for detailed description of substitutions, R-groups and preferred embodiments
  MOD_RES (15)..(18): Any L- or D-natural or non-natural amino acid, and this range may encompass 1 or 4 residues; see specification as filed for detailed description of substitutions, R-groups and preferred embodiments
  c-term may be amidated

SEQ ID NO: 1568 - protein, 32 aa, Artificial Sequence; identical to SEQ ID NO: 1483
  Description of Artificial Sequence: Synthetic peptide
  MOD_RES (1)..(1): Any L- or D-natural amino acid and any non-natural amino acid; see specification as filed for detailed description of substitutions, R-groups and preferred embodiments
  MOD_RES (8)..(9): Any L- or D-natural amino acid and any non-natural amino acid; see specification as filed for detailed description of substitutions, R-groups and preferred embodiments
  MOD_RES (12)..(12): Any L- or D-natural amino acid and any non-natural amino acid; see specification as filed for detailed description of substitutions, R-groups and preferred embodiments
  MOD_RES (15)..(18): Any L- or D-natural or non-natural amino acid, and this range may encompass 1 or 4 residues; see specification as filed for detailed description of substitutions, R-groups and preferred embodiments
  c-term may be amidated

SEQ ID NO: 1569 - protein, 32 aa, Artificial Sequence; identical to SEQ ID NO: 1484
  Description of Artificial Sequence: Synthetic peptide
  MOD_RES (2)..(2): Any L- or D-natural amino acid and any non-natural amino acid; see specification as filed for detailed description of substitutions, R-groups and preferred embodiments
  MOD_RES (8)..(9): Any L- or D-natural amino acid and any non-natural amino acid; see specification as filed for detailed description of substitutions, R-groups and preferred embodiments
  MOD_RES (12)..(12): Any L- or D-natural amino acid and any non-natural amino acid; see specification as filed for detailed description of substitutions, R-groups and preferred embodiments
  MOD_RES (15)..(18): Any L- or D-natural or non-natural amino acid, and this range may encompass 1 or 4 residues; see specification as filed for detailed description of substitutions, R-groups and preferred embodiments
  c-term may be amidated

SEQ ID NO: 1570 - protein, 32 aa, Artificial Sequence; identical to SEQ ID NO: 1485
  Description of Artificial Sequence: Synthetic peptide
  MOD_RES (3)..(3): Any L- or D-natural amino acid and any non-natural amino acid; see specification as filed for detailed description of substitutions, R-groups and preferred embodiments
  MOD_RES (8)..(9): Any L- or D-natural amino acid and any non-natural amino acid; see specification as filed for detailed description of substitutions, R-groups and preferred embodiments
  MOD_RES (12)..(12): Any L- or D-natural amino acid and any non-natural amino acid; see specification as filed for detailed description of substitutions, R-groups and preferred embodiments
  MOD_RES (15)..(18): Any L- or D-natural or non-natural amino acid, and this range may encompass 1 or 4 residues; see specification as filed for detailed description of substitutions, R-groups and preferred embodiments
  c-term may be amidated

SEQ ID NO: 1571 - protein, 32 aa, Artificial Sequence; identical to SEQ ID NO: 1486
  Description of Artificial Sequence: Synthetic peptide
  MOD_RES (4)..(4): Any L- or D-natural amino acid and any non-natural amino acid; see specification as filed for detailed description of substitutions, R-groups and preferred embodiments
  MOD_RES (8)..(9): Any L- or D-natural amino acid and any non-natural amino acid; see specification as filed for detailed description of substitutions, R-groups and preferred embodiments
  MOD_RES (12)..(12): Any L- or D-natural amino acid and any non-natural amino acid; see specification as filed for detailed description of substitutions, R-groups and preferred embodiments
  MOD_RES (15)..(18): Any L- or D-natural or non-natural amino acid, and this range may encompass 1 or 4 residues; see specification as filed for detailed description of substitutions, R-groups and preferred embodiments
  c-term may be amidated

SEQ ID NO: 1572 - protein, 32 aa, Artificial Sequence; identical to SEQ ID NO: 1487
  Description of Artificial Sequence: Synthetic peptide
  MOD_RES (5)..(5): Any L- or D-natural amino acid and any non-natural amino acid; see specification as filed for detailed description of substitutions, R-groups and preferred embodiments
  MOD_RES (8)..(9): Any L- or D-natural amino acid and any non-natural amino acid; see specification as filed for detailed description of substitutions, R-groups and preferred embodiments
  MOD_RES (12)..(12): Any L- or D-natural amino acid and any non-natural amino acid; see specification as filed for detailed description of substitutions, R-groups and preferred embodiments
  MOD_RES (15)..(18): Any L- or D-natural or non-natural amino acid, and this range may encompass 1 or 4 residues; see specification as filed for detailed description of substitutions, R-groups and preferred embodiments
  c-term may be amidated

SEQ ID NO: 1573 - protein, 32 aa, Artificial Sequence; identical to SEQ ID NO: 1488
  Description of Artificial Sequence: Synthetic peptide
  MOD_RES (6)..(6): Any L- or D-natural amino acid and any non-natural amino acid; see specification as filed for detailed description of substitutions, R-groups and preferred embodiments
  MOD_RES (8)..(9): Any L- or D-natural amino acid and any non-natural amino acid; see specification as filed for detailed description of substitutions, R-groups and preferred embodiments
  MOD_RES (12)..(12): Any L- or D-natural amino acid and any non-natural amino acid; see specification as filed for detailed description of substitutions, R-groups and preferred embodiments
  MOD_RES (15)..(18): Any L- or D-natural or non-natural amino acid, and this range may encompass 1 or 4 residues; see specification as filed for detailed description of substitutions, R-groups and preferred embodiments
  c-term may be amidated

SEQ ID NO: 1574 - protein, 32 aa, Artificial Sequence; identical to SEQ ID NO: 1489
  Description of Artificial Sequence: Synthetic peptide
  MOD_RES (7)..(9): Any L- or D-natural amino acid and any non-natural amino acid; see specification as filed for detailed description of substitutions, R-groups and preferred embodiments
  MOD_RES (12)..(12): Any L- or D-natural amino acid and any non-natural amino acid; see specification as filed for detailed description of substitutions, R-groups and preferred embodiments
  MOD_RES (15)..(18): Any L- or D-natural or non-natural amino acid, and this range may encompass 1 or 4 residues; see specification as filed for detailed description of substitutions, R-groups and preferred embodiments
  c-term may be amidated

SEQ ID NO: 1575 - protein, 32 aa, Artificial Sequence; identical to SEQ ID NO: 1490
  Description of Artificial Sequence: Synthetic peptide
  MOD_RES (1)..(1): Any L- or D-natural amino acid and any non-natural amino acid; see specification as filed for detailed description of substitutions, R-groups and preferred embodiments
  MOD_RES (8)..(9): Any L- or D-natural amino acid and any non-natural amino acid; see specification as filed for detailed description of substitutions, R-groups and preferred embodiments
  MOD_RES (13)..(13): Any L- or D-natural amino acid and any non-natural amino acid; see specification as filed for detailed description of substitutions, R-groups and preferred embodiments
  MOD_RES (15)..(18): Any L- or D-natural or non-natural amino acid, and this range may encompass 1 or 4 residues; see specification as filed for detailed description of substitutions, R-groups and preferred embodiments
  c-term may be amidated

SEQ ID NO: 1576 - protein, 32 aa, Artificial Sequence; identical to SEQ ID NO: 1491
  Description of Artificial Sequence: Synthetic peptide
  MOD_RES (2)..(2): Any L- or D-natural amino acid and any non-natural amino acid; see specification as filed for detailed description of substitutions, R-groups and preferred embodiments
  MOD_RES (8)..(9): Any L- or D-natural amino acid and any non-natural amino acid; see specification as filed for detailed description of substitutions, R-groups and preferred embodiments
  MOD_RES (13)..(13): Any L- or D-natural amino acid and any non-natural amino acid; see specification as filed for detailed description of substitutions, R-groups and preferred embodiments
  MOD_RES (15)..(18): Any L- or D-natural or non-natural amino acid, and this range may encompass 1 or 4 residues; see specification as filed for detailed description of substitutions, R-groups and preferred embodiments
  c-term may be amidated

SEQ ID NO: 1577 - protein, 32 aa, Artificial Sequence; identical to SEQ ID NO: 1492
  Description of Artificial Sequence: Synthetic peptide
  MOD_RES (3)..(3): Any L- or D-natural amino acid and any non-natural amino acid; see specification as filed for detailed description of substitutions, R-groups and preferred embodiments
  MOD_RES (8)..(9): Any L- or D-natural amino acid and any non-natural amino acid; see specification as filed for detailed description of substitutions, R-groups and preferred embodiments
  MOD_RES (13)..(13): Any L- or D-natural amino acid and any non-natural amino acid; see specification as filed for detailed description of substitutions, R-groups and preferred embodiments
  MOD_RES (15)..(18): Any L- or D-natural or non-natural amino acid, and this range may encompass 1 or 4 residues; see specification as filed for detailed description of substitutions, R-groups and preferred embodiments
  c-term may be amidated

SEQ ID NO: 1578 - protein, 32 aa, Artificial Sequence; identical to SEQ ID NO: 1493
  Description of Artificial Sequence: Synthetic peptide
  MOD_RES (4)..(4): Any L- or D-natural amino acid and any non-natural amino acid; see specification as filed for detailed description of substitutions, R-groups and preferred embodiments
  MOD_RES (8)..(9): Any L- or D-natural amino acid and any non-natural amino acid; see specification as filed for detailed description of substitutions, R-groups and preferred embodiments
  MOD_RES (13)..(13): Any L- or D-natural amino acid and any non-natural amino acid; see specification as filed for detailed description of substitutions, R-groups and preferred embodiments
  MOD_RES (15)..(18): Any L- or D-natural or non-natural amino acid, and this range may encompass 1 or 4 residues; see specification as filed for detailed description of substitutions, R-groups and preferred embodiments
  c-term may be amidated

SEQ ID NO: 1579 - protein, 32 aa, Artificial Sequence; identical to SEQ ID NO: 1494
  Description of Artificial Sequence: Synthetic peptide
  MOD_RES (5)..(5): Any L- or D-natural amino acid and any non-natural amino acid; see specification as filed for detailed description of substitutions, R-groups and preferred embodiments
  MOD_RES (8)..(9): Any L- or D-natural amino acid and any non-natural amino acid; see specification as filed for detailed description of substitutions, R-groups and preferred embodiments
  MOD_RES (13)..(13): Any L- or D-natural amino acid and any non-natural amino acid; see specification as filed for detailed description of substitutions, R-groups and preferred embodiments
  MOD_RES (15)..(18): Any L- or D-natural or non-natural amino acid, and this range may encompass 1 or 4 residues; see specification as filed for detailed description of substitutions, R-groups and preferred embodiments
  c-term may be amidated

SEQ ID NO: 1580 - protein, 32 aa, Artificial Sequence; identical to SEQ ID NO: 1495
  Description of Artificial Sequence: Synthetic peptide
  MOD_RES (6)..(6): Any L- or D-natural amino acid and any non-natural amino acid; see specification as filed for detailed description of substitutions, R-groups and preferred embodiments
  MOD_RES (8)..(9): Any L- or D-natural amino acid and any non-natural amino acid; see specification as filed for detailed description of substitutions, R-groups and preferred embodiments
  MOD_RES (13)..(13): Any L- or D-natural amino acid and any non-natural amino acid; see specification as filed for detailed description of substitutions, R-groups and preferred embodiments
  MOD_RES (15)..(18): Any L- or D-natural or non-natural amino acid, and this range may encompass 1 or 4 residues; see specification as filed for detailed description of substitutions, R-groups and preferred embodiments
  c-term may be amidated

SEQ ID NO: 1581 - protein, 32 aa, Artificial Sequence; identical to SEQ ID NO: 1496
  Description of Artificial Sequence: Synthetic peptide
  MOD_RES (7)..(9): Any L- or D-natural amino acid and any non-natural amino acid; see specification as filed for detailed description of substitutions, R-groups and preferred embodiments
  MOD_RES (13)..(13): Any L- or D-natural amino acid and any non-natural amino acid; see specification as filed for detailed description of substitutions, R-groups and preferred embodiments
  MOD_RES (15)..(18): Any L- or D-natural or non-natural amino acid, and this range may encompass 1 or 4 residues; see specification as filed for detailed description of substitutions, R-groups and preferred embodiments
  c-term may be amidated

SEQ ID NO: 1582 - protein, 32 aa, Artificial Sequence; identical to SEQ ID NO: 1497
  Description of Artificial Sequence: Synthetic peptide
  MOD_RES (1)..(1): Any L- or D-natural amino acid and any non-natural amino acid; see specification as filed for detailed description of substitutions, R-groups and preferred embodiments
  MOD_RES (8)..(9): Any L- or D-natural amino acid and any non-natural amino acid; see specification as filed for detailed description of substitutions, R-groups and preferred embodiments
  MOD_RES (14)..(14): Any L- or D-natural amino acid and any non-natural amino acid; see specification as filed for detailed description of substitutions, R-groups and preferred embodiments
  MOD_RES (15)..(18): Any L- or D-natural or non-natural amino acid, and this range may encompass 1 or 4 residues; see specification as filed for detailed description of substitutions, R-groups and preferred embodiments
  c-term may be amidated

SEQ ID NO: 1583 - protein, 32 aa, Artificial Sequence; identical to SEQ ID NO: 1498
  Description of Artificial Sequence: Synthetic peptide
  MOD_RES (2)..(2): Any L- or D-natural amino acid and any non-natural amino acid; see specification as filed for detailed description of substitutions, R-groups and preferred embodiments
  MOD_RES (8)..(9): Any L- or D-natural amino acid and any non-natural amino acid; see specification as filed for detailed description of substitutions, R-groups and preferred embodiments
  MOD_RES (14)..(14): Any L- or D-natural amino acid and any non-natural amino acid; see specification as filed for detailed description of substitutions, R-groups and preferred embodiments
  MOD_RES (15)..(18): Any L- or D-natural or non-natural amino acid, and this range may encompass 1 or 4 residues; see specification as filed for detailed description of substitutions, R-groups and preferred embodiments
  c-term may be amidated

SEQ ID NO: 1584 - protein, 32 aa, Artificial Sequence; identical to SEQ ID NO: 1499
  Description of Artificial Sequence: Synthetic peptide
  MOD_RES (3)..(3): Any L- or D-natural amino acid and any non-natural amino acid; see specification as filed for detailed description of substitutions, R-groups and preferred embodiments
  MOD_RES (8)..(9): Any L- or D-natural amino acid and any non-natural amino acid; see specification as filed for detailed description of substitutions, R-groups and preferred embodiments
  MOD_RES (14)..(14): Any L- or D-natural amino acid and any non-natural amino acid; see specification as filed for detailed description of substitutions, R-groups and preferred embodiments
  MOD_RES (15)..(18): Any L- or D-natural or non-natural amino acid, and this range may encompass 1 or 4 residues; see specification as filed for detailed description of substitutions, R-groups and preferred embodiments
  c-term may be amidated

SEQ ID NO: 1585 - protein, 32 aa, Artificial Sequence; identical to SEQ ID NO: 1500
  Description of Artificial Sequence: Synthetic peptide
  MOD_RES (4)..(4): Any L- or D-natural amino acid and any non-natural amino acid; see specification as filed for detailed description of substitutions, R-groups and preferred embodiments
  MOD_RES (8)..(9): Any L- or D-natural amino acid and any non-natural amino acid; see specification as filed for detailed description of substitutions, R-groups and preferred embodiments
  MOD_RES (14)..(14): Any L- or D-natural amino acid and any non-natural amino acid; see specification as filed for detailed description of substitutions, R-groups and preferred embodiments
  MOD_RES (15)..(18): Any L- or D-natural or non-natural amino acid, and this range may encompass 1 or 4 residues; see specification as filed for detailed description of substitutions, R-groups and preferred embodiments
  c-term may be amidated

SEQ ID NO: 1586 - protein, 32 aa, Artificial Sequence; identical to SEQ ID NO: 1501
  Description of Artificial Sequence: Synthetic peptide
  MOD_RES (5)..(5): Any L- or D-natural amino acid and any non-natural amino acid; see specification as filed for detailed description of substitutions, R-groups and preferred embodiments
  MOD_RES (8)..(9): Any L- or D-natural amino acid and any non-natural amino acid; see specification as filed for detailed description of substitutions, R-groups and preferred embodiments
  MOD_RES (14)..(14): Any L- or D-natural amino acid and any non-natural amino acid; see specification as filed for detailed description of substitutions, R-groups and preferred embodiments
  MOD_RES (15)..(18): Any L- or D-natural or non-natural amino acid, and this range may encompass 1 or 4 residues; see specification as filed for detailed description of substitutions, R-groups and preferred embodiments
  c-term may be amidated

SEQ ID NO: 1587 - protein, 32 aa, Artificial Sequence; identical to SEQ ID NO: 1502
  Description of Artificial Sequence: Synthetic peptide
  MOD_RES (6)..(6): Any L- or D-natural amino acid and any non-natural amino acid; see specification as filed for detailed description of substitutions, R-groups and preferred embodiments
  MOD_RES (8)..(9): Any L- or D-natural amino acid and any non-natural amino acid; see specification as filed for detailed description of substitutions, R-groups and preferred embodiments
  MOD_RES (14)..(14): Any L- or D-natural amino acid and any non-natural amino acid; see specification as filed for detailed description of substitutions, R-groups and preferred embodiments
  MOD_RES (15)..(18): Any L- or D-natural or non-natural amino acid, and this range may encompass 1 or 4 residues; see specification as filed for detailed description of substitutions, R-groups and preferred embodiments
  c-term may be amidated

SEQ ID NO: 1588 - protein, 32 aa, Artificial Sequence; identical to SEQ ID NO: 1503
  Description of Artificial Sequence: Synthetic peptide
  MOD_RES (7)..(9): Any L- or D-natural amino acid and any non-natural amino acid; see specification as filed for detailed description of substitutions, R-groups and preferred embodiments
  MOD_RES (14)..(14): Any L- or D-natural amino acid and any non-natural amino acid; see specification as filed for detailed description of substitutions, R-groups and preferred embodiments
  MOD_RES (15)..(18): Any L- or D-natural or non-natural amino acid, and this range may encompass 1 or 4 residues; see specification as filed for detailed description of substitutions, R-groups and preferred embodiments
  c-term may be amidated

SEQ ID NO: 1589 - protein, 33 aa, Artificial Sequence
  Description of Artificial Sequence: Synthetic peptide
  MOD_RES (15)..(18): Any L- or D-natural or non-natural amino acid, and this range may encompass 1 or 4 residues; see specification as filed for detailed description of substitutions, R-groups and preferred embodiments
  c-term may be amidated
ILPIASSCCTEVSHXXXXAHQGKHETYGHKTPY

SEQ ID NO: 1590 - protein, 33 aa, Artificial Sequence; identical to SEQ ID NO: 1504
  Description of Artificial Sequence: Synthetic peptide
  MOD_RES (1)..(1): Any L- or D-natural amino acid and any non-natural amino acid; see specification as filed for detailed description of substitutions, R-groups and preferred embodiments
  MOD_RES (8)..(9): Any L- or D-natural amino acid and any non-natural amino acid; see specification as filed for detailed description of substitutions, R-groups and preferred embodiments
  MOD_RES (15)..(18): Any L- or D-natural or non-natural amino acid, and this range may encompass 1 or 4 residues; see specification as filed for detailed description of substitutions, R-groups and preferred embodiments
  c-term may be amidated

SEQ ID NO: 1591 - protein, 33 aa, Artificial Sequence; identical to SEQ ID NO: 1505
  Description of Artificial Sequence: Synthetic peptide
  MOD_RES (2)..(2): Any L- or D-natural amino acid and any non-natural amino acid; see specification as filed for detailed description of substitutions, R-groups and preferred embodiments
  MOD_RES (8)..(9): Any L- or D-natural amino acid and any non-natural amino acid; see specification as filed for detailed description of substitutions, R-groups and preferred embodiments
  MOD_RES (15)..(18): Any L- or D-natural or non-natural amino acid, and this range may encompass 1 or 4 residues; see specification as filed for detailed description of substitutions, R-groups and preferred embodiments
  c-term may be amidated

SEQ ID NO: 1592 - protein, 33 aa, Artificial Sequence; identical to SEQ ID NO: 1506
  Description of Artificial Sequence: Synthetic peptide
  MOD_RES (3)..(3): Any L- or D-natural amino acid and any non-natural amino acid; see specification as filed for detailed description of substitutions, R-groups and preferred embodiments
  MOD_RES (8)..(9): Any L- or D-natural amino acid and any non-natural amino acid; see specification as filed for detailed description of substitutions, R-groups and preferred embodiments
  MOD_RES (15)..(18): Any L- or D-natural or non-natural amino acid, and this range may encompass 1 or 4 residues; see specification as filed for detailed description of substitutions, R-groups and preferred embodiments
  c-term may be amidated

SEQ ID NO: 1593 - protein, 33 aa, Artificial Sequence; identical to SEQ ID NO: 1507
  Description of Artificial Sequence: Synthetic peptide
  MOD_RES (4)..(4): Any L- or D-natural amino acid and any non-natural amino acid; see specification as filed for detailed description of substitutions, R-groups and preferred embodiments
  MOD_RES (8)..(9): Any L- or D-natural amino acid and any non-natural amino acid; see specification as filed for detailed description of substitutions, R-groups and preferred embodiments
  MOD_RES (15)..(18): Any L- or D-natural or non-natural amino acid, and this range may encompass 1 or 4 residues; see specification as filed for detailed description of substitutions, R-groups and preferred embodiments
  c-term may be amidated

SEQ ID NO: 1594 - protein, 33 aa, Artificial Sequence; identical to SEQ ID NO: 1508
  Description of Artificial Sequence: Synthetic peptide
  MOD_RES (5)..(5): Any L- or D-natural amino acid and any non-natural amino acid; see specification as filed for detailed description of substitutions, R-groups and preferred embodiments
  MOD_RES (8)..(9): Any L- or D-natural amino acid and any non-natural amino acid; see specification as filed for detailed description of substitutions, R-groups and preferred embodiments
  MOD_RES (15)..(18): Any L- or D-natural or non-natural amino acid, and this range may encompass 1 or 4 residues; see specification as filed for detailed description of substitutions, R-groups and preferred embodiments
  c-term may be amidated

SEQ ID NO: 1595 - protein, 33 aa, Artificial Sequence; identical to SEQ ID NO: 1509
  Description of Artificial Sequence: Synthetic peptide
  MOD_RES (6)..(6): Any L- or D-natural amino acid and any non-natural amino acid; see specification as filed for detailed description of substitutions, R-groups and preferred embodiments
  MOD_RES (8)..(9): Any L- or D-natural amino acid and any non-natural amino acid; see specification as filed for detailed description of substitutions, R-groups and preferred embodiments
  MOD_RES (15)..(18): Any L- or D-natural or non-natural amino acid, and this range may encompass 1 or 4 residues; see specification as filed for detailed description of substitutions, R-groups and preferred embodiments
  c-term may be amidated

SEQ ID NO: 1596 - protein, 33 aa, Artificial Sequence; identical to SEQ ID NO: 1510
  Description of Artificial Sequence: Synthetic peptide
  MOD_RES (7)..(9): Any L- or D-natural amino acid and any non-natural amino acid; see specification as filed for detailed description of substitutions, R-groups and preferred embodiments
  MOD_RES (15)..(18): Any L- or D-natural or non-natural amino acid, and this range may encompass 1 or 4 residues; see specification as filed for detailed description of substitutions, R-groups and preferred embodiments
  c-term may be amidated

SEQ ID NO: 1597 - protein, 33 aa, Artificial Sequence; identical to SEQ ID NO: 1511
  Description of Artificial Sequence: Synthetic peptide
  MOD_RES (1)..(1): Any L- or D-natural amino acid and any non-natural amino acid; see specification as filed for detailed description of substitutions, R-groups and preferred embodiments
  MOD_RES (8)..(10): Any L- or D-natural amino acid and any non-natural amino acid; see specification as filed for detailed description of substitutions, R-groups and preferred embodiments
  MOD_RES (15)..(18): Any L- or D-natural or non-natural amino acid, and this range may encompass 1 or 4 residues; see specification as filed for detailed description of substitutions, R-groups and preferred embodiments
  c-term may be amidated

SEQ ID NO: 1598 - protein, 33 aa, Artificial Sequence; identical to SEQ ID NO: 1512
  Description of Artificial Sequence: Synthetic peptide
  MOD_RES (2)..(2): Any L- or D-natural amino acid and any non-natural amino acid; see specification as filed for detailed description of substitutions, R-groups and preferred embodiments
  MOD_RES (8)..(10): Any L- or D-natural amino acid and any non-natural amino acid; see specification as filed for detailed description of substitutions, R-groups and preferred embodiments
  MOD_RES (15)..(18): Any L- or D-natural or non-natural amino acid, and this range may encompass 1 or 4 residues; see specification as filed for detailed description of substitutions, R-groups and preferred embodiments
  c-term may be amidated

SEQ ID NO: 1599 - protein, 33 aa, Artificial Sequence; identical to SEQ ID NO: 1513
  Description of Artificial Sequence: Synthetic peptide
  MOD_RES (3)..(3): Any L- or D-natural amino acid and any non-natural amino acid; see specification as filed for detailed description of substitutions, R-groups and preferred embodiments
  MOD_RES (8)..(10): Any L- or D-natural amino acid and any non-natural amino acid; see specification as filed for detailed description of substitutions, R-groups and preferred embodiments
  MOD_RES (15)..(18): Any L- or D-natural or non-natural amino acid, and this range may encompass 1 or 4 residues; see specification as filed for detailed description of substitutions, R-groups and preferred embodiments
  c-term may be amidated

SEQ ID NO: 1600 - protein, 33 aa, Artificial Sequence; identical to SEQ ID NO: 1514
  Description of Artificial Sequence: Synthetic peptide
  MOD_RES (4)..(4): Any L- or D-natural amino acid and any non-natural amino acid; see specification as filed for detailed description of substitutions, R-groups and preferred embodiments
  MOD_RES (8)..(10): Any L- or D-natural amino acid and any non-natural amino acid; see specification as filed for detailed description of substitutions, R-groups and preferred embodiments
  MOD_RES (15)..(18): Any L- or D-natural or non-natural amino acid, and this range may encompass 1 or 4 residues; see specification as filed for detailed description of substitutions, R-groups and preferred embodiments
  c-term may be amidated

SEQ ID NO: 1601 - protein, 33 aa, Artificial Sequence; identical to SEQ ID NO: 1515
  Description of Artificial Sequence: Synthetic peptide
  MOD_RES (5)..(5): Any L- or D-natural amino acid and any non-natural amino acid; see specification as filed for detailed description of substitutions, R-groups and preferred embodiments
  MOD_RES (8)..(10): Any L- or D-natural amino acid and any non-natural amino acid; see specification as filed for detailed description of substitutions, R-groups and preferred embodiments
  MOD_RES (15)..(18): Any L- or D-natural or non-natural amino acid, and this range may encompass 1 or 4 residues; see specification as filed for detailed description of substitutions, R-groups and preferred embodiments
  c-term may be amidated

SEQ ID NO: 1602 - protein, 33 aa, Artificial Sequence; identical to SEQ ID NO: 1516
  Description of Artificial Sequence: Synthetic peptide
  MOD_RES (6)..(6): Any L- or D-natural amino acid and any non-natural amino acid; see specification as filed for detailed description of substitutions, R-groups and preferred embodiments
  MOD_RES (8)..(10): Any L- or D-natural amino acid and any non-natural amino acid; see specification as filed for detailed description of substitutions, R-groups and preferred embodiments
  MOD_RES (15)..(18): Any L- or D-natural or non-natural amino acid, and this range may encompass 1 or 4 residues; see specification as filed for detailed description of substitutions, R-groups and preferred embodiments
  c-term may be amidated

SEQ ID NO: 1603 - protein, 33 aa, Artificial Sequence; identical to SEQ ID NO: 1517
  Description of Artificial Sequence: Synthetic peptide
  MOD_RES (7)..(10): Any L- or D-natural amino acid and any non-natural amino acid; see specification as filed for detailed description of substitutions, R-groups and preferred embodiments
  MOD_RES (15)..(18): Any L- or D-natural or non-natural amino acid, and this range may encompass 1 or 4 residues; see specification as filed for detailed description of substitutions, R-groups and preferred embodiments
  c-term may be amidated

SEQ ID NO: 1604 - protein, 33 aa, Artificial Sequence; identical to SEQ ID NO: 1518
  Description of Artificial Sequence: Synthetic peptide
  MOD_RES (1)..(1): Any L- or D-natural amino acid and any non-natural amino acid; see specification as filed for detailed description of substitutions, R-groups and preferred embodiments
  MOD_RES (8)..(9): Any L- or D-natural amino acid and any non-natural amino acid; see specification as filed for detailed description of substitutions, R-groups and preferred embodiments
  MOD_RES (11)..(11): Any L- or D-natural amino acid and any non-natural amino acid; see specification as filed for detailed description of substitutions, R-groups and preferred embodiments
  MOD_RES (15)..(18): Any L- or D-natural or non-natural amino acid, and this range may encompass 1 or 4 residues; see specification as filed for detailed description of substitutions, R-groups and preferred embodiments
  c-term may be amidated

SEQ ID NO: 1605 - protein, 33 aa, Artificial Sequence; identical to SEQ ID NO: 1519
  Description of Artificial Sequence: Synthetic peptide
  MOD_RES (2)..(2): Any L- or D-natural amino acid and any non-natural amino acid; see specification as filed for detailed description of substitutions, R-groups and preferred embodiments
  MOD_RES (8)..(9): Any L- or D-natural amino acid and any non-natural amino acid; see specification as filed for detailed description of substitutions, R-groups and preferred embodiments
  MOD_RES (11)..(11): Any L- or D-natural amino acid and any non-natural amino acid; see specification as filed for detailed description of substitutions, R-groups and preferred embodiments
  MOD_RES (15)..(18): Any L- or D-natural or non-natural amino acid, and this range may encompass 1 or 4 residues; see specification as filed for detailed description of substitutions, R-groups and preferred embodiments
  c-term may be amidated

SEQ ID NO: 1606 - protein, 33 aa, Artificial Sequence; identical to SEQ ID NO: 1520
  Description of Artificial Sequence: Synthetic peptide
  MOD_RES (3)..(3): Any L- or D-natural amino acid and any non-natural amino acid; see specification as filed for detailed description of substitutions, R-groups and preferred embodiments
  MOD_RES (8)..(9): Any L- or D-natural amino acid and any non-natural amino acid; see specification as filed for detailed description of substitutions, R-groups and preferred embodiments
  MOD_RES (11)..(11): Any L- or D-natural amino acid and any non-natural amino acid; see specification as filed for detailed description of substitutions, R-groups and preferred embodiments
  MOD_RES (15)..(18): Any L- or D-natural or non-natural amino acid, and this range may encompass 1 or 4 residues; see specification as filed for detailed description of substitutions, R-groups and preferred embodiments
  c-term may be amidated

SEQ ID NO: 1607 - protein, 33 aa, Artificial Sequence; identical to SEQ ID NO: 1521
  Description of Artificial Sequence: Synthetic peptide
  MOD_RES (4)..(4): Any L- or D-natural amino acid and any non-natural amino acid; see specification as filed for detailed description of substitutions, R-groups and preferred embodiments
  MOD_RES (8)..(9): Any L- or D-natural amino acid and any non-natural amino acid; see specification as filed for detailed description of substitutions, R-groups and preferred embodiments
  MOD_RES (11)..(11): Any L- or D-natural amino acid and any non-natural amino acid; see specification as filed for detailed description of substitutions, R-groups and preferred embodiments
  MOD_RES (15)..(18): Any L- or D-natural or non-natural amino acid, and this range may encompass 1 or 4 residues; see specification as filed for detailed description of substitutions, R-groups and preferred embodiments
  c-term may be amidated

SEQ ID NO: 1608 - protein, 33 aa, Artificial Sequence; identical to SEQ ID NO: 1522
  Description of Artificial Sequence: Synthetic peptide
  MOD_RES (5)..(5): Any L- or D-natural amino acid and any non-natural amino acid; see specification as filed for detailed description of substitutions, R-groups and preferred embodiments
  MOD_RES (8)..(9): Any L- or D-natural amino acid and any non-natural amino acid; see specification as filed for detailed description of substitutions, R-groups and preferred embodiments
  MOD_RES (11)..(11): Any L- or D-natural amino acid and any non-natural amino acid; see specification as filed for detailed description of substitutions, R-groups and preferred embodiments
  MOD_RES (15)..(18): Any L- or D-natural or non-natural amino acid, and this range may encompass 1 or 4 residues; see specification as filed for detailed description of substitutions, R-groups and preferred embodiments
  c-term may be amidated

SEQ ID NO: 1609 - protein, 33 aa, Artificial Sequence; identical to SEQ ID NO: 1523
  Description of Artificial Sequence: Synthetic peptide
  MOD_RES (6)..(6): Any L- or D-natural amino acid and any non-natural amino acid; see specification as filed for detailed description of substitutions, R-groups and preferred embodiments
  MOD_RES (8)..(9): Any L- or D-natural amino acid and any non-natural amino acid; see specification as filed for detailed description of substitutions, R-groups and preferred embodiments
  MOD_RES (11)..(11): Any L- or D-natural amino acid and any non-natural amino acid; see specification as filed for detailed description of substitutions, R-groups and preferred embodiments
  MOD_RES (15)..(18): Any L- or D-natural or non-natural amino acid, and this range may encompass 1 or 4 residues; see specification as filed for detailed description of substitutions, R-groups and preferred embodiments
  c-term may be amidated

SEQ ID NO: 1610 - protein, 33 aa, Artificial Sequence; identical to SEQ ID NO: 1524
  Description of Artificial Sequence: Synthetic peptide
  MOD_RES (7)..(9): Any L- or D-natural amino acid and any non-natural amino acid; see specification as filed for detailed description of substitutions, R-groups and preferred embodiments
  MOD_RES (11)..(11): Any L- or D-natural amino acid and any non-natural amino acid; see specification as filed for detailed description of substitutions, R-groups and preferred embodiments
  MOD_RES (15)..(18): Any L- or D-natural or non-natural amino acid, and this range may encompass 1 or 4 residues; see specification as filed for detailed description of substitutions, R-groups and preferred embodiments
  c-term may be amidated

SEQ ID NO: 1611 - protein, 33 aa, Artificial Sequence; identical to SEQ ID NO: 1525
  Description of Artificial Sequence: Synthetic peptide
  MOD_RES (1)..(1): Any L- or D-natural amino acid and any non-natural amino acid; see specification as filed for detailed description of substitutions, R-groups and preferred embodiments
  MOD_RES (8)..(9): Any L- or D-natural amino acid and any non-natural amino acid; see specification as filed for detailed description of substitutions, R-groups and preferred embodiments
  MOD_RES (12)..(12): Any L- or D-natural amino acid and any non-natural amino acid; see specification as filed for detailed description of substitutions, R-groups and preferred embodiments
  MOD_RES (15)..(18): Any L- or D-natural or non-natural amino acid, and this range may encompass 1 or 4 residues; see specification as filed for detailed description of substitutions, R-groups and preferred embodiments
  c-term may be amidated

SEQ ID NO: 1612 - protein, 33 aa, Artificial Sequence; identical to SEQ ID NO: 1526
  Description of Artificial Sequence: Synthetic peptide
  MOD_RES (2)..(2): Any L- or D-natural amino acid and any non-natural amino acid; see specification as filed for detailed description of substitutions, R-groups and preferred embodiments
  MOD_RES (8)..(9): Any L- or D-natural amino acid and any non-natural amino acid; see specification as filed for detailed description of substitutions, R-groups and preferred embodiments
  MOD_RES (12)..(12): Any L- or D-natural amino acid and any non-natural amino acid; see specification as filed for detailed description of substitutions, R-groups and preferred embodiments
  MOD_RES (15)..(18): Any L- or D-natural or non-natural amino acid, and this range may encompass 1 or 4 residues; see specification as filed for detailed description of substitutions, R-groups and preferred embodiments
  c-term may be amidated

SEQ ID NO: 1613 - protein, 33 aa, Artificial Sequence; identical to SEQ ID NO: 1527
  Description of Artificial Sequence: Synthetic peptide
  MOD_RES (3)..(3): Any L- or D-natural amino acid and any non-natural amino acid; see specification as filed for detailed description of substitutions, R-groups and preferred embodiments
  MOD_RES (8)..(9): Any L- or D-natural amino acid and any non-natural amino acid; see specification as filed for detailed description of substitutions, R-groups and preferred embodiments
  MOD_RES (12)..(12): Any L- or D-natural amino acid and any non-natural amino acid; see specification as filed for detailed description of substitutions, R-groups and preferred embodiments
  MOD_RES (15)..(18): Any L- or D-natural or non-natural amino acid, and this range may encompass 1 or 4 residues; see specification as filed for detailed description of substitutions, R-groups and preferred embodiments
  c-term may be amidated

SEQ ID NO: 1614 - protein, 33 aa, Artificial Sequence; identical to SEQ ID NO: 1528
  Description of Artificial Sequence: Synthetic peptide
  MOD_RES (4)..(4): Any L- or D-natural amino acid and any non-natural amino acid; see specification as filed for detailed description of substitutions, R-groups and preferred embodiments
  MOD_RES (8)..(9): Any L- or D-natural amino acid and any non-natural amino acid; see specification as filed for detailed description of substitutions, R-groups and preferred embodiments
  MOD_RES (12)..(12): Any L- or D-natural amino acid and any non-natural amino acid; see specification as filed for detailed description of substitutions, R-groups and preferred embodiments
  MOD_RES (15)..(18): Any L- or D-natural or non-natural amino acid, and this range may encompass 1 or 4 residues; see specification as filed for detailed description of substitutions, R-groups and preferred embodiments
  c-term may be amidated

SEQ ID NO: 1615 - protein, 33 aa, Artificial Sequence; identical to SEQ ID NO: 1529
  Description of Artificial Sequence: Synthetic peptide
  MOD_RES (5)..(5): Any L- or D-natural amino acid and any non-natural amino acid; see specification as filed for detailed description of substitutions, R-groups and preferred embodiments
  MOD_RES (8)..(9): Any L- or D-natural amino acid and any non-natural amino acid; see specification as filed for detailed description of substitutions, R-groups and preferred embodiments
  MOD_RES (12)..(12): Any L- or D-natural amino acid and any non-natural amino acid; see specification as filed for detailed description of substitutions, R-groups and preferred embodiments
  MOD_RES (15)..(18): Any L- or D-natural or non-natural amino acid, and this range may encompass 1 or 4 residues; see specification as filed for detailed description of substitutions, R-groups and preferred embodiments
  c-term may be amidated

SEQ ID NO: 1616 - protein, 33 aa, Artificial Sequence; identical to SEQ ID NO: 1530
  Description of Artificial Sequence: Synthetic peptide
  MOD_RES (6)..(6): Any L- or D-natural amino acid and any non-natural amino acid; see specification as filed for detailed description of substitutions, R-groups and preferred embodiments
  MOD_RES (8)..(9): Any L- or D-natural amino acid and any non-natural amino acid; see specification as filed for detailed description of substitutions, R-groups and preferred embodiments
  MOD_RES (12)..(12): Any L- or D-natural amino acid and any non-natural amino acid; see specification as filed for detailed description of substitutions, R-groups and preferred embodiments
  MOD_RES (15)..(18): Any L- or D-natural or non-natural amino acid, and this range may encompass 1 or 4 residues; see specification as filed for detailed description of substitutions, R-groups and preferred embodiments
  c-term may be amidated

SEQ ID NO: 1617 - protein, 33 aa, Artificial Sequence; identical to SEQ ID NO: 1531
  Description of Artificial Sequence: Synthetic peptide
  MOD_RES (7)..(9): Any L- or D-natural amino acid and any non-natural amino acid; see specification as filed for detailed description of substitutions, R-groups and preferred embodiments
  MOD_RES (12)..(12): Any L- or D-natural amino acid and any non-natural amino acid; see specification as filed for detailed description of substitutions, R-groups and preferred embodiments
  MOD_RES (15)..(18): Any L- or D-natural or non-natural amino acid, and this range may encompass 1 or 4 residues; see specification as filed for detailed description of substitutions, R-groups and preferred embodiments
  c-term may be amidated

SEQ ID NO: 1618 - protein, 33 aa, Artificial Sequence; identical to SEQ ID NO: 1532
  Description of Artificial Sequence: Synthetic peptide
  MOD_RES (1)..(1): Any L- or D-natural amino acid and any non-natural amino acid; see specification as filed for detailed description of substitutions, R-groups and preferred embodiments
  MOD_RES (8)..(9): Any L- or D-natural amino acid and any non-natural amino acid; see specification as filed for detailed description of substitutions, R-groups and preferred embodiments
  MOD_RES (13)..(13): Any L- or D-natural amino acid and any non-natural amino acid; see specification as filed for detailed description of substitutions, R-groups and preferred embodiments
  MOD_RES (15)..(18): Any L- or D-natural or non-natural amino acid, and this range may encompass 1 or 4 residues; see specification as filed for detailed description of substitutions, R-groups and preferred embodiments
  c-term may be amidated

SEQ ID NO: 1619 - protein, 33 aa, Artificial Sequence; identical to SEQ ID NO: 1533
  Description of Artificial Sequence: Synthetic peptide
  MOD_RES (2)..(2): Any L- or D-natural amino acid and any non-natural amino acid; see specification as filed for detailed description of substitutions, R-groups and preferred embodiments
  MOD_RES (8)..(9): Any L- or D-natural amino acid and any non-natural amino acid; see specification as filed for detailed description of substitutions, R-groups and preferred embodiments
  MOD_RES (13)..(13): Any L- or D-natural amino acid and any non-natural amino acid; see specification as filed for detailed description of substitutions, R-groups and preferred embodiments
  MOD_RES (15)..(18): Any L- or D-natural or non-natural amino acid, and this range may encompass 1 or 4 residues; see specification as filed for detailed description of substitutions, R-groups and preferred embodiments
  c-term may be amidated

SEQ ID NO: 1620 - protein, 33 aa, Artificial Sequence; identical to SEQ ID NO: 1534
  Description of Artificial Sequence: Synthetic peptide
  MOD_RES (3)..(3): Any L- or D-natural amino acid and any non-natural amino acid; see specification as filed for detailed description of substitutions, R-groups and preferred embodiments
  MOD_RES (8)..(9): Any L- or D-natural amino acid and any non-natural amino acid; see specification as filed for detailed description of substitutions, R-groups and preferred embodiments
  MOD_RES (13)..(13): Any L- or D-natural amino acid and any non-natural amino acid; see specification as filed for detailed description of substitutions, R-groups and preferred embodiments
  MOD_RES (15)..(18): Any L- or D-natural or non-natural amino acid, and this range may encompass 1 or 4 residues; see specification as filed for detailed description of substitutions, R-groups and preferred embodiments
  c-term may be amidated

SEQ ID NO: 1621 - protein, 33 aa, Artificial Sequence; identical to SEQ ID NO: 1535
  Description of Artificial Sequence: Synthetic peptide
  MOD_RES (4)..(4): Any L- or D-natural amino acid and any non-natural amino acid; see specification as filed for detailed description of substitutions, R-groups and preferred embodiments
  MOD_RES (8)..(9): Any L- or D-natural amino acid and any non-natural amino acid; see specification as filed for detailed description of substitutions, R-groups and preferred embodiments
  MOD_RES (13)..(13): Any L- or D-natural amino acid and any non-natural amino acid; see specification as filed for detailed description of substitutions, R-groups and preferred embodiments
  MOD_RES (15)..(18): Any L- or D-natural or non-natural amino acid, and this range may encompass 1 or 4 residues; see specification as filed for detailed description of substitutions, R-groups and preferred embodiments
  c-term may be amidated

SEQ ID NO: 1622 - protein, 33 aa, Artificial Sequence; identical to SEQ ID NO: 1536
  Description of Artificial Sequence: Synthetic peptide
  MOD_RES (5)..(5): Any L- or D-natural amino acid and any non-natural amino acid; see specification as filed for detailed description of substitutions, R-groups and preferred embodiments
  MOD_RES (8)..(9): Any L- or D-natural amino acid and any non-natural amino acid; see specification as filed for detailed description of substitutions, R-groups and preferred embodiments
  MOD_RES (13)..(13): Any L- or D-natural amino acid and any non-natural amino acid; see specification as filed for detailed description of substitutions, R-groups and preferred embodiments
  MOD_RES (15)..(18): Any L- or D-natural or non-natural amino acid, and this range may encompass 1 or 4 residues; see specification as filed for detailed description of substitutions, R-groups and preferred embodiments
  c-term may be amidated

SEQ ID NO: 1623 - protein, 33 aa, Artificial Sequence; identical to SEQ ID NO: 1537
  Description of Artificial Sequence: Synthetic peptide
  MOD_RES (6)..(6): Any L- or D-natural amino acid and any non-natural amino acid; see specification as filed for detailed description of substitutions, R-groups and preferred embodiments
  MOD_RES (8)..(9): Any L- or D-natural amino acid and any non-natural amino acid; see specification as filed for detailed description of substitutions, R-groups and preferred embodiments
  MOD_RES (13)..(13): Any L- or D-natural amino acid and any non-natural amino acid; see specification as filed for detailed description of substitutions, R-groups and preferred embodiments
  MOD_RES (15)..(18): Any L- or D-natural or non-natural amino acid, and this range may encompass 1 or 4 residues; see specification as filed for detailed description of substitutions, R-groups and preferred embodiments
  c-term may be amidated

SEQ ID NO: 1624 - protein, 33 aa, Artificial Sequence; identical to SEQ ID NO: 1538
  Description of Artificial Sequence: Synthetic peptide
  MOD_RES (7)..(9): Any L- or D-natural amino acid and any non-natural amino acid; see specification as filed for detailed description of substitutions, R-groups and preferred embodiments
  MOD_RES (13)..(13): Any L- or D-natural amino acid and any non-natural amino acid; see specification as filed for detailed description of substitutions, R-groups and preferred embodiments
  MOD_RES (15)..(18): Any L- or D-natural or non-natural amino acid, and this range may encompass 1 or 4 residues; see specification as filed for detailed description of substitutions, R-groups and preferred embodiments
  c-term may be amidated

SEQ ID NO: 1625 - protein, 33 aa, Artificial Sequence; identical to SEQ ID NO: 1539
  Description of Artificial Sequence: Synthetic peptide
  MOD_RES (1)..(1): Any L- or D-natural amino acid and any non-natural amino acid; see specification as filed for detailed description of substitutions, R-groups and preferred embodiments
  MOD_RES (8)..(9): Any L- or D-natural amino acid and any non-natural amino acid; see specification as filed for detailed description of substitutions, R-groups and preferred embodiments
  MOD_RES (14)..(14): Any L- or D-natural amino acid and any non-natural amino acid; see specification as filed for detailed description of substitutions, R-groups and preferred embodiments
  MOD_RES (15)..(18): Any L- or D-natural or non-natural amino acid, and this range may encompass 1 or 4 residues; see specification as filed for detailed description of substitutions, R-groups and preferred embodiments
  c-term may be amidated

SEQ ID NO: 1626 - protein, 33 aa, Artificial Sequence; identical to SEQ ID NO: 1540
  Description of Artificial Sequence: Synthetic peptide
  MOD_RES (2)..(2): Any L- or D-natural amino acid and any non-natural amino acid; see specification as filed for detailed description of substitutions, R-groups and preferred embodiments
  MOD_RES (8)..(9): Any L- or D-natural amino acid and any non-natural amino acid; see specification as filed for detailed description of substitutions, R-groups and preferred embodiments
  MOD_RES (14)..(14): Any L- or D-natural amino acid and any non-natural amino acid; see specification as filed for detailed description of substitutions, R-groups and preferred embodiments
  MOD_RES (15)..(18): Any L- or D-natural or non-natural amino acid, and this range may encompass 1 or 4 residues; see specification as filed for detailed description of substitutions, R-groups and preferred embodiments
  c-term may be amidated

SEQ ID NO: 1627 - protein, 33 aa, Artificial Sequence; identical to SEQ ID NO: 1541
  Description of Artificial Sequence: Synthetic peptide
  MOD_RES (3)..(3): Any L- or D-natural amino acid and any non-natural amino acid; see specification as filed for detailed description of substitutions, R-groups and preferred embodiments
  MOD_RES (8)..(9): Any L- or D-natural amino acid and any non-natural amino acid; see specification as filed for detailed description of substitutions, R-groups and preferred embodiments
  MOD_RES (14)..(14): Any L- or D-natural amino acid and any non-natural amino acid; see specification as filed for detailed description of substitutions, R-groups and preferred embodiments
  MOD_RES (15)..(18): Any L- or D-natural or non-natural amino acid, and this range may encompass 1 or 4 residues; see specification as filed for detailed description of substitutions, R-groups and preferred embodiments
  c-term may be amidated

SEQ ID NO: 1628 - protein, 33 aa, Artificial Sequence; identical to SEQ ID NO: 1542
  Description of Artificial Sequence: Synthetic peptide
  MOD_RES (4)..(4): Any L- or D-natural amino acid and any non-natural amino acid; see specification as filed for detailed description of substitutions, R-groups and preferred embodiments
  MOD_RES (8)..(9): Any L- or D-natural amino acid and any non-natural amino acid; see specification as filed for detailed description of substitutions, R-groups and preferred embodiments
  MOD_RES (14)..(14): Any L- or D-natural amino acid and any non-natural amino acid; see specification as filed for detailed description of substitutions, R-groups and preferred embodiments
  MOD_RES (15)..(18): Any L- or D-natural or non-natural amino acid, and this range may encompass 1 or 4 residues; see specification as filed for detailed description of substitutions, R-groups and preferred embodiments
  c-term may be amidated

SEQ ID NO: 1629 - protein, 33 aa, Artificial Sequence; identical to SEQ ID NO: 1543
  Description of Artificial Sequence: Synthetic peptide
  MOD_RES (5)..(5): Any L- or D-natural amino acid and any non-natural amino acid; see specification as filed for detailed description of substitutions, R-groups and preferred embodiments
  MOD_RES (8)..(9): Any L- or D-natural amino acid and any non-natural amino acid; see specification as filed for detailed description of substitutions, R-groups and preferred embodiments
  MOD_RES (14)..(14): Any L- or D-natural amino acid and any non-natural amino acid; see specification as filed for detailed description of substitutions, R-groups and preferred embodiments
  MOD_RES (15)..(18): Any L- or D-natural or non-natural amino acid, and this range may encompass 1 or 4 residues; see specification as filed for detailed description of substitutions, R-groups and preferred embodiments
  c-term may be amidated

SEQ ID NO: 1630 - protein, 33 aa, Artificial Sequence; identical to SEQ ID NO: 1544
  Description of Artificial Sequence: Synthetic peptide
  MOD_RES (6)..(6): Any L- or D-natural amino acid and any non-natural amino acid; see specification as filed for detailed description of substitutions, R-groups and preferred embodiments
  MOD_RES (8)..(9): Any L- or D-natural amino acid and any non-natural amino acid; see specification as filed for detailed description of substitutions, R-groups and preferred embodiments
  MOD_RES (14)..(14): Any L- or D-natural amino acid and any non-natural amino acid; see specification as filed for detailed description of substitutions, R-groups and preferred embodiments
  MOD_RES (15)..(18): Any L- or D-natural or non-natural amino acid, and this range may encompass 1 or 4 residues; see specification as filed for detailed description of substitutions, R-groups and preferred embodiments
  c-term may be amidated

SEQ ID NO: 1631 - protein, 33 aa, Artificial Sequence; identical to SEQ ID NO: 1545
  Description of Artificial Sequence: Synthetic peptide
  MOD_RES (7)..(9): Any L- or D-natural amino acid and any non-natural amino acid; see specification as filed for detailed description of substitutions, R-groups and preferred embodiments
  MOD_RES (14)..(14): Any L- or D-natural amino acid and any non-natural amino acid; see specification as filed for detailed description of substitutions, R-groups and preferred embodiments
  MOD_RES (15)..(18): Any L- or D-natural or non-natural amino acid, and this range may encompass 1 or 4 residues; see specification as filed for detailed description of substitutions, R-groups and preferred embodiments
  c-term may be amidated

SEQ ID NO: 1632 - protein, 35 aa, Artificial Sequence
  Description of Artificial Sequence: Synthetic peptide
  c-term may be amidated
SAKELRCQCIKTYSKGGGGNWVQRVVEKFLKRAEN

SEQ ID NO: 1633 - protein, 33 aa, Artificial Sequence
  Description of Artificial Sequence: Synthetic peptide
  c-term may be amidated
SAKELRCQCIKTYGGGGNWVQRVVEKFLKRAEN

SEQ ID NO: 1634 - protein, 31 aa, Artificial Sequence
  Description of Artificial Sequence: Synthetic peptide
  c-term may be amidated
SAKELRCQCIKGGGGNWVQRVVEKFLKRAEN

SEQ ID NO: 1635 - protein, 10 aa, Artificial Sequence
  Description of Artificial Sequence: Synthetic peptide
  c-term may be amidated
KSMQVPFSRA

SEQ ID NO: 1636 - protein, 15 aa, Artificial Sequence
  Description of Artificial Sequence: Synthetic peptide
  c-term may be amidated
AFSFAEQEIPLRAIL

SEQ ID NO: 1637 - protein, 23 aa, Artificial Sequence
  Description of Artificial Sequence: Synthetic peptide
  c-term may be amidated
AFSFAEQEIPLRAILCYRNTSSI

SEQ ID NO: 1638 - protein, 24 aa, Artificial Sequence
  Description of Artificial Sequence: Synthetic peptide
  c-term may be amidated
AYRNTSSICSNEGLIFKLKRGKEA

SEQ ID NO: 1639 - protein, 24 aa, Artificial Sequence
  Description of Artificial Sequence: Synthetic peptide
  c-term may be amidated
AALDTVGWVQRHRKMLRHCPSKRK

SEQ ID NO: 1640 - protein, 4 aa, Artificial Sequence
  Description of Artificial Sequence: Synthetic peptide
GGGG

SEQ ID NO: 1641 - protein, 15 aa, Artificial Sequence
  Description of Artificial Sequence: Synthetic peptide
  c-term may be amidated
SAKELRCQCIKTYSK

SEQ ID NO: 1642 - protein, 16 aa, Artificial Sequence
  Description of Artificial Sequence: Synthetic peptide
  c-term may be amidated
NWVQRVVEKFLKRAEN

SEQ ID NO: 1643 - protein, 31 aa, Artificial Sequence; identical to SEQ ID NO: 1634
  Description of Artificial Sequence: Synthetic peptide
  c-term may be amidated

SEQ ID NO: 1644 - protein, 33 aa, Artificial Sequence; identical to SEQ ID NO: 1633
  Description of Artificial Sequence: Synthetic peptide
  c-term may be amidated

SEQ ID NO: 1645 - protein, 35 aa, Artificial Sequence; identical to SEQ ID NO: 1632
  Description of Artificial Sequence: Synthetic peptide
  c-term may be amidated

SEQ ID NO: 1646 - protein, 32 aa, Artificial Sequence
  Description of Artificial Sequence: Synthetic peptide
  MOD_RES (16): 11-aminoundecanoic acid
  c-term may be amidated
SAKELRCQCIKTYSKXNWVQRVVEKFLKRAEN

SEQ ID NO: 1647 - protein, 32 aa, Artificial Sequence
  Description of Artificial Sequence: Synthetic peptide
  MOD_RES (16): 11-aminoundecanoic acid
  c-term may be amidated
SAKELRAQFIKTYSKXNWVQRVVEKFLKRAEN

SEQ ID NO: 1648 - protein, 32 aa, Artificial Sequence; identical to SEQ ID NO: 1647
  Description of Artificial Sequence: Synthetic peptide
  MOD_RES (16): 8-amino-3,6-dioxoctanoic acid
  c-term may be amidated

SEQ ID NO: 1649 - protein, 32 aa, Artificial Sequence
  Description of Artificial Sequence: Synthetic peptide
  MOD_RES (16): 11-aminoundecanoic acid
  c-term may be amidated
SAKELRSQSIKTYSKXNWVQRVVEKFLKRAEN

SEQ ID NO: 1650 - protein, 32 aa, Artificial Sequence; identical to SEQ ID NO: 1647
  Description of Artificial Sequence: Synthetic peptide
  MOD_RES (16): 11-aminoundecanoic acid
  c-term may be amidated

SEQ ID NO: 1651 - protein, 32 aa, Artificial Sequence; identical to SEQ ID NO: 1649
  Description of Artificial Sequence: Synthetic peptide
  MOD_RES (16): 11-aminoundecanoic acid
  c-term may be amidated

SEQ ID NO: 1652 - protein, 32 aa, Artificial Sequence
  Description of Artificial Sequence: Synthetic peptide
  MOD_RES (16): 11-aminoundecanoic acid
  c-term may be amidated
SAKELRAQYIKTYSKXNWVQRVVEKFLKRAEN

SEQ ID NO: 1653 - protein, 32 aa, Artificial Sequence; identical to SEQ ID NO: 1652
  Description of Artificial Sequence: Synthetic peptide
  MOD_RES (16): 11-aminoundecanoic acid
  c-term may be amidated

SEQ ID NO: 1654 - protein, 32 aa, Artificial Sequence
  Description of Artificial Sequence: Synthetic peptide
  MOD_RES (16): 11-aminoundecanoic acid
  c-term may be amidated
SAKELRYQFIKTYSKXNWVQRVVEKFLKRAEN

SEQ ID NO: 1655 - protein, 32 aa, Artificial Sequence; identical to SEQ ID NO: 1654
  Description of Artificial Sequence: Synthetic peptide
  MOD_RES (16): 11-aminoundecanoic acid
  c-term may be amidated

SEQ ID NO: 1656 - protein, 32 aa, Artificial Sequence
  Description of Artificial Sequence: Synthetic peptide
  MOD_RES (16): 11-aminoundecanoic acid
  c-term may be amidated
SAKELRYQAIKTYSKXNWVQRVVEKFLKRAEN

SEQ ID NO: 1657 - protein, 32 aa, Artificial Sequence; identical to SEQ ID NO: 1656
  Description of Artificial Sequence: Synthetic peptide
  MOD_RES (16): 11-aminoundecanoic acid
  c-term may be amidated

SEQ ID NO: 1658 - protein, 32 aa, Artificial Sequence
  Description of Artificial Sequence: Synthetic peptide
  MOD_RES (16): 11-aminoundecanoic acid
  c-term may be amidated
SAKELRYQYIKTYSKXNWVQRVVEKFLKRAEN

SEQ ID NO: 1659 - protein, 32 aa, Artificial Sequence; identical to SEQ ID NO: 1658
  Description of Artificial Sequence: Synthetic peptide
  MOD_RES (16): 11-aminoundecanoic acid
  c-term may be amidated

SEQ ID NO: 1660 - protein, 32 aa, Artificial Sequence
  Description of Artificial Sequence: Synthetic peptide
  MOD_RES (16): 11-aminoundecanoic acid
  c-term may be amidated
SAKELRAQFIRTYSKXNWVQRVVEKFLKRAEN

SEQ ID NO: 1661 - protein, 32 aa, Artificial Sequence
  Description of Artificial Sequence: Synthetic peptide
  MOD_RES (16): 11-aminoundecanoic acid
  c-term may be amidated
SAKELRYQFIRTYSKXNWVQRVVEKFLKRAEN

SEQ ID NO: 1662 - protein, 32 aa, Artificial Sequence; identical to SEQ ID NO: 1661
  Description of Artificial Sequence: Synthetic peptide
  MOD_RES (16): 11-aminoundecanoic acid
  c-term may be amidated

SEQ ID NO: 1663 - protein, 32 aa, Artificial Sequence; identical to SEQ ID NO: 1647
  Description of Artificial Sequence: Synthetic peptide
  MOD_RES (16): 11-aminoundecanoic acid
  c-term may be amidated

SEQ ID NO: 1664 - protein, 32 aa, Artificial Sequence; identical to SEQ ID NO: 1647
  Description of Artificial Sequence: Synthetic peptide
  MOD_RES (16): 11-aminoundecanoic acid
  c-term may be amidated

SEQ ID NO: 1665 - protein, 32 aa, Artificial Sequence; identical to SEQ ID NO: 1652
  Description of Artificial Sequence: Synthetic peptide
  MOD_RES (16): 11-aminoundecanoic acid
  c-term may be amidated

SEQ ID NO: 1666 - protein, 32 aa, Artificial Sequence; identical to SEQ ID NO: 1654
  Description of Artificial Sequence: Synthetic peptide
  MOD_RES (16): 11-aminoundecanoic acid
  c-term may be amidated

SEQ ID NO: 1667 - protein, 32 aa, Artificial Sequence; identical to SEQ ID NO: 1658
  Description of Artificial Sequence: Synthetic peptide
  MOD_RES (16): 11-aminoundecanoic acid
  c-term may be amidated

SEQ ID NO: 1668 - protein, 32 aa, Artificial Sequence
  Description of Artificial Sequence: Synthetic peptide
  MOD_RES (16): 11-aminoundecanoic acid
  c-term may be amidated
SAKELRHQYIKTYSKXNWVQRVVEKFLKRAEN

SEQ ID NO: 1669 - protein, 32 aa, Artificial Sequence
  Description of Artificial Sequence: Synthetic peptide
  MOD_RES (16): 11-aminoundecanoic acid
  c-term may be amidated
SAKELRYQHIKTYSKXNWVQRVVEKFLKRAEN

SEQ ID NO: 1670 - protein, 32 aa, Artificial Sequence
  Description of Artificial Sequence: Synthetic peptide
  MOD_RES (16): 11-aminoundecanoic acid
  c-term may be amidated
SAKELRYQWIKTYSKXNWVQRVVEKFLKRAEN

SEQ ID NO: 1671 - protein, 32 aa, Artificial Sequence; identical to SEQ ID NO: 1660
  Description of Artificial Sequence: Synthetic peptide
  MOD_RES (16): 11-aminoundecanoic acid
  c-term may be amidated

SEQ ID NO: 1672 - protein, 32 aa, Artificial Sequence
  Description of Artificial Sequence: Synthetic peptide
  MOD_RES (16): 11-aminoundecanoic acid
  c-term may be amidated
SAKELRYQWIRTYSKXNWVQRVVEKFLKRAEN

SEQ ID NO: 1673 - protein, 32 aa, Artificial Sequence
  Description of Artificial Sequence: Synthetic peptide
  MOD_RES (16): 11-aminoundecanoic acid
  c-term may be amidated
SAKELRYQWIRTYSRXNWVQRVVEKFLKRAEN

SEQ ID NO: 1674 - protein, 32 aa, Artificial Sequence
  Description of Artificial Sequence: Synthetic peptide
  MOD_RES (16): 11-aminoundecanoic acid
  c-term may be amidated
SAKELRWQWIRTYSRXNWVQRVVEKFLKRAEN

SEQ ID NO: 1675 - protein, 32 aa, Artificial Sequence
  Description of Artificial Sequence: Synthetic peptide
  MOD_RES (16): 11-aminoundecanoic acid
  c-term may be amidated
SAKELRHQWIRTYSRXNWVQRVVEKFLKRAEN

1-95. (canceled)

96. A composition comprising an IL-8 mimetic selected from a group consisting of SEQ ID NO:1642, variants a172 and a309, conservatively modified variants thereof, and prodrugs and codrugs thereof, wherein the IL-8 mimetic has the following structure:
(SEQ ID NO:1642)
R_{N}-Asn-Trp-Val-Gln-Arg-Val-Val-Glu-Lys-Phe-Leu-
Lys-Arg-Ala-Glu-Asn-R_{C};
wherein,
R_{N} is selected from a group consisting of a hydrogen; an acetyl; an oligopeptide consisting of 3 to 19 amino acids; an oligopeptide consisting of 3 to 15 amino acids and a linker for connecting R_{N} to the Asn¹ residue of SEQ ID NO:1642; a diagnostic label; a glycosaminoglycan, a poly(ethylene glycol), or a derivative thereof, an N-terminal modifier capable of reducing the ability of the IL-8 mimetic to act as a substrate for aminopeptidases; and combinations thereof,
R_{C} is selected from a group consisting of a hydroxyl; an amido; an amino; a glycosaminoglycan, a poly(ethylene glycol), or a derivative thereof, a diagnostic label; a C-terminal modifier capable of reducing the ability of the IL-8 mimetic to act as a substrate for carboxypeptidases; and combinations thereof; and,
the linker is selected from a group consisting of (a) any combination of four natural amino acids, and (b) any non-natural amino acid having the following structure: [chemical structure]
wherein, R_{L} is selected from a group consisting of saturated and unsaturated aliphatics and heteroaliphatics consisting of 20 or fewer carbon atoms that are optionally substituted with a hydroxyl, carboxyl, amino, amido, or imino group; or an aromatic group having from 5 to 7 members in the ring; and —(CH₂)ₙ—, wherein n is an integer ranging from 1 to 20.

97. The composition of claim 96, wherein the IL-8 mimetic consists of the variant a172, R_{N} consists of a 15 amino acid oligopeptide and an 11-aminoundecanoic acid linker for connecting R_{N} to the Asn¹ residue of SEQ ID NO:1642, R_{C} comprises an amido group, and SEQ ID NO:1642 is optionally cyclized.

98. The composition of claim 96, wherein R_{N} consists of an oligopeptide consisting of 15 or less amino acids and comprising a Glu-Leu-Arg motif.

99. The composition of claim 96, wherein R_{N} consists of a 15 amino acid oligopeptide comprising a Glu⁴-Leu⁵-Arg⁶ motif and a Gln⁸ residue.

100. The composition of claim 96, wherein R_{N} or R_{C} comprise a poly(ethylene glycol), a glycosaminoglycan, or a derivative thereof, each having a molecular weight of less than about 20,000 Daltons.

101. A composition comprising an IL-8 mimetic selected from a group consisting of SEQ ID NO:36, variant a182, conservatively modified variants thereof, and prodrugs and codrugs thereof, wherein the IL-8 mimetic has the following structure:
R_{N}-Ser-Ala-Lys-Glu-Leu-Arg-Xaa₁-Gln-Xaa₂-Ile-Xaa₄-Thr-Tyr-Ser-Lys-[linker]-Asn-Trp-Val-Gln-Arg-Val-Val-Glu-Lys-Phe-Leu-Lys-Arg-Ala-Glu-Asn-R_{C} (SEQ ID NO:36);
wherein,
Xaa₁, Xaa₂, and Xaa₄ are each independently selected from a group consisting of (a) any natural amino acid; and (b) any non-natural amino acid having the structure H₂N—R_{L}—COOH, where R_{L} is selected from a group consisting of saturated and unsaturated aliphatics and heteroaliphatics consisting of 20 or fewer carbon atoms, cycloalkyl amines, and fused cycloalkyl amines;
R_{N} is an N-terminal modifier comprising a component selected from a group consisting of a hydrogen, a poly(ethylene glycol) or derivative thereof, a diagnostic label, an acyl group, an acetyl group, and an N-terminal modifier capable of reducing the ability of the IL-8 mimetic to act as a substrate for aminopeptidases;
R_{C} is a C-terminal modifier comprising a component selected from a group consisting of a hydroxyl group, an amido group, an amino group, a poly(ethylene glycol) or derivative thereof, a diagnostic label, and a C-terminal modifier capable of reducing the ability of the IL-8 mimetic to act as a substrate for carboxypeptidases; and,
the linker is selected from a group consisting of (a) any combination of four natural amino acids, and (b) any non-natural amino acid having the following structure: [chemical structure]
wherein, R_{L} is selected from a group consisting of saturated and unsaturated aliphatics and heteroaliphatics consisting of 20 or fewer carbon atoms that are optionally substituted with a hydroxyl, carboxyl, amino, amido, or imino group; or an aromatic group having from 5 to 7 members in the ring; and —(CH₂)ₙ—, wherein n is an integer ranging from 1 to 20.

102. The composition of claim 101, wherein the linker comprises 11-aminoundecanoic acid.

103. The composition of claim 101, wherein Xaa₁, Xaa₂, and Xaa₄ are each independently selected from a group consisting of Ala, Phe, Ser, Tyr, Arg, His, and Trp.

104. The composition of claim 101, wherein the Lys¹⁵ residue is replaced with an Arg¹⁵ residue.

105. The composition of claim 101, wherein the IL-8 mimetic is selected from a group consisting of SEQ ID NOs:1645-1647, 1649, 1652-1659, 1661; variants a312-314, a316, a319-326, and a328; and conservatively modified variants thereof.

106. The composition of claim 101, wherein the IL-8 mimetic consists of SEQ ID NO:1647, variant a314, conservatively modified variants thereof, and prodrugs and codrugs thereof, wherein the IL-8 mimetic has the following structure:
H-Ser-Ala-Lys-Glu-Leu-Arg-Ala-Gln-Phe-Ile-Lys-Thr-Tyr-Ser-Lys-[11-aminoundecanoic acid]-Asn-Trp-Val-Gln-Arg-Val-Val-Glu-Lys-Phe-Leu-Lys-Arg-Ala-Glu-Asn-NH₂ (SEQ ID NO:1647);

107. The composition of claim 101, wherein R_{N} or R_{C} comprise a poly(ethylene glycol), a glycosaminoglycan, or derivative thereof, each having a molecular weight of less than about 20,000 Daltons.

108. The composition of claim 101, wherein the IL-8 mimetic consists of SEQ ID NO:109, variant a254, conservatively modified variants thereof, and prodrugs and codrugs thereof, wherein the IL-8 mimetic has the following structure:
R_{N}-Ser-Ala-Lys-Glu-Leu-Arg-Xaa₁-Gln-Xaa₂-Ile-Xaa₄-Thr-Tyr-Ser-Lys¹⁵-[linker]-Asn-Trp-Val-Gln-Arg-Val-Val-Glu-Lys-Phe-Leu-Lys-Arg-Ala-Glu-Asn-R_{C} (SEQ ID NO:109); wherein, the C-terminal region is cyclized at the underlined residues.

109. The composition of claim 108, wherein the Lys¹⁵ residue is replaced with an Arg¹⁵ residue.

110. The composition of claim 108, wherein the IL-8 mimetic is selected from a group consisting of SEQ ID NOs:1663-1668, and 1670-1675; variants a330-335, and a337-342; and conservatively modified variants thereof.

111. The composition of claim 108, wherein the IL-8 mimetic is selected from a group consisting of SEQ ID NOs:1663-1665, and 1670-1674; variants a330-332, and a337-341; and conservatively modified variants thereof.

112. A method of modulating an IL-8-mediated activity of a cell having an IL-8 receptor comprising binding the IL-8 receptor of the cell with an IL-8 mimetic selected from a group consisting of SEQ ID NO:1642, variants a172 and a309, conservatively modified variants thereof, and prodrugs and codrugs thereof, wherein the IL-8 mimetic has the following structure:
(SEQ ID NO:1642)
R_{N}-Asn-Trp-Val-Gln-Arg-Val-Val-Glu-Lys-Phe-Leu-
Lys-Arg-Ala-Glu-Asn-R_{C};
wherein,
R_{N} is selected from a group consisting of a hydrogen; an acetyl; an oligopeptide consisting of 3 to 19 amino acids; an oligopeptide consisting of 3 to 15 amino acids and a linker for connecting R_{N} to the Asn¹ residue of SEQ ID NO:1642; a diagnostic label; a glycosaminoglycan, a poly(ethylene glycol), or a derivative thereof; an N-terminal modifier capable of reducing the ability of the IL-8 mimetic to act as a substrate for aminopeptidases; and combinations thereof;
R_{C} is selected from a group consisting of a hydroxyl; an amido; an amino; a glycosaminoglycan, a poly(ethylene glycol), or a derivative thereof; a diagnostic label; a C-terminal modifier capable of reducing the ability of the IL-8 mimetic to act as a substrate for carboxypeptidases; and combinations thereof; and,
the linker is selected from a group consisting of (a) any combination of four natural amino acids, and (b) any non-natural amino acid having the following structure: [chemical structure]
wherein, R_{L} is selected from a group consisting of saturated and unsaturated aliphatics and heteroaliphatics consisting of 20 or fewer carbon atoms that are optionally substituted with a hydroxyl, carboxyl, amino, amido, or imino group; or an aromatic group having from 5 to 7 members in the ring; and —(CH₂)ₙ—, wherein n is an integer ranging from 1 to 20.

113. The composition of claim 112, wherein the IL-8 mimetic consists of the variant a172, R_{N} consists of a 15 amino acid oligopeptide and an 11-aminoundecanoic acid linker for connecting R_{N} to the Asn¹ residue of SEQ ID NO:1642, R_{C} comprises an amido group, and SEQ ID NO:1642 is optionally cyclized.

114. The method of claim 112, wherein R_{N} consists of an oligopeptide consisting of 15 or less amino acids and comprising a Glu-Leu-Arg motif.

115. The method of claim 112, wherein R_{N} consists of a 15 amino acid oligopeptide comprising a Glu⁴-Leu⁵-Arg⁶ motif and a Gln⁸ residue.

116. The method of claim 112, wherein R_{N} or R_{C} comprise a poly(ethylene glycol), a glycosaminoglycan, or a derivative thereof, each having a molecular weight of less than about 20,000 Daltons.

117. The method of claim 112, wherein the IL-8 receptor is a CXCR1 or CXCR2 receptor.

118. The method of claim 112, wherein the cell is a hematopoietic cell selected from a group consisting of hematopoietic stem cells, hematopoietic progenitor cells, primitive granulocytes, primitive erythroid cells, leukocytes, and neutrophils.

119. The method of claim 118, wherein the cell is selected from a group consisting of colony-forming unit granulocyte-macrophage, colony-forming unit granulocyte erythrocyte macrophage megakaryocyte, and burst-forming unit erythroid cells.

120. The method of claim 112, wherein the IL-8-mediated activity comprises cell expansion, cell mobilization, or a combination thereof.

121. A method of increasing an IL-8-mediated activity of a cell having an IL-8 receptor comprising binding the IL-8 receptor of the cell with an IL-8 mimetic selected from a group consisting of SEQ ID NO:36, variant a182, conservatively modified variants thereof, and prodrugs and codrugs thereof, wherein the IL-8 mimetic has the following structure:
R_{N}-Ser-Ala-Lys-Glu-Leu-Arg-Xaa₁-Gln-Xaa₂-Ile-Xaa₄-Thr-Tyr-Ser-Lys-[linker]-Asn-Trp-Val-Gln-Arg-Val-Val-Glu-Lys-Phe-Leu-Lys-Arg-Ala-Glu-Asn-R_{C} (SEQ ID NO:36);
wherein,
Xaa₁, Xaa₂, and Xaa₄ are each independently selected from a group consisting of (a) any natural amino acid; and (b) any non-natural amino acid having the structure H₂N—R_{L}—COOH, where R_{L} is selected from a group consisting of saturated and unsaturated aliphatics and heteroaliphatics consisting of 20 or fewer carbon atoms, cycloalkyl amines, and fused cycloalkyl amines;
R_{N} is an N-terminal modifier comprising a component selected from a group consisting of a hydrogen, a poly(ethylene glycol) or derivative thereof, a diagnostic label, an acyl group, an acetyl group, and an N-terminal modifier capable of reducing the ability of the IL-8 mimetic to act as a substrate for aminopeptidases;
R_{C} is a C-terminal modifier comprising a component selected from a group consisting of a hydroxyl group, an amido group, an amino group, a poly(ethylene glycol) or derivative thereof, a diagnostic label, and a C-terminal modifier capable of reducing the ability of the IL-8 mimetic to act as a substrate for carboxypeptidases; and,
the linker is selected from a group consisting of (a) any combination of four natural amino acids, and (b) any non-natural amino acid having the following structure: [chemical structure]
wherein, R_{L} is selected from a group consisting of saturated and unsaturated aliphatics and heteroaliphatics consisting of 20 or fewer carbon atoms that are optionally substituted with a hydroxyl, carboxyl, amino, amido, or imino group; or an aromatic group having from 5 to 7 members in the ring; and —(CH₂)ₙ—, wherein n is an integer ranging from 1 to 20.

122. The method of claim 121, wherein the linker comprises 11-aminoundecanoic acid.

123. The method of claim 121, wherein Xaa₁, Xaa₂, and Xaa₄ are each independently selected from a group consisting of Ala, Phe, Ser, Tyr, Arg, His, and Trp.

124. The method of claim 121, wherein the Lys¹⁵ residue is replaced with an Arg¹⁵ residue.

125. The method of claim 121, wherein the IL-8 mimetic is selected from a group consisting of SEQ ID NOs:1645-1647, 1649, 1652-1659, 1661; variants a312-314, a316, a319-326, and a328; and conservatively modified variants thereof.

126. The method of claim 121, wherein the IL-8 mimetic consists of SEQ ID NO:1647, variant a314, conservatively modified variants thereof, and prodrugs and codrugs thereof, wherein the IL8 mimetic has the following structure:
(SEQ ID NO:1647)
H-Ser-Ala-Lys-Glu-Leu-Arg-Ala-Gln-Phe-Ile-Lys-Thr-
Tyr-Ser-Lys-[11-aminoundecanoic acid]-Asn-Trp-Val-
Gln-Arg-Val-Val-Glu-Lys-Phe-Leu-Lys-Arg-Ala-Glu-
Asn-NH₂;

127. The method of claim 121, wherein R_{N} or R_{C} comprise a glycosaminoglycan, poly(ethylene glycol), or a derivative thereof, each having a molecular weight of less than about 20,000 Daltons.

128. The method of claim 121, wherein the IL-8 mimetic consists of SEQ ID NO:109, variant a254, conservatively modified variants thereof, and prodrugs and codrugs thereof, wherein the IL-8 mimetic has the following structure:
(SEQ ID NO: 109)
RN-Ser-Ala-Lys-Glu-Leu-Arg-Xaa₁-Gln-Xaa₂-Ile-Xaa₄-
Thr-Tyr-Ser-Lys¹⁵-[linker]-Asn-Trp-Val-Gln-Arg-
Val-Val-Glu-Lys-Phe-Leu-Lys-Arg-Ala-Glu-Asn-R_{C};
wherein, the C-terminal region is cyclized at the underlined residues.

129. The method of claim 128, wherein the Lys¹⁵ residue is replaced with an Arg¹⁵ residue.

130. The method of claim 128, wherein the IL-8 mimetic is selected from a group consisting of SEQ ID NOs:1663-1668, and 1670-1675; variants a330-335, and a337-342; and conservatively modified variants thereof.

131. The method of claim 128, wherein the IL-8 mimetic is selected from a group consisting of SEQ ID NOs:1663-1665, and 1670-1674; variants a330-332, and a337-341; and conservatively modified variants thereof.

132. The method of claim 121, wherein the IL-8 receptor is a CXCR1 or CXCR2 receptor.

133. The method of claim 121, wherein the cell is a hematopoietic cell selected from a group consisting of hematopoietic stem cells, hematopoietic progenitor cells, primitive granulocytes, primitive erythroid cells, leukocytes, and neutrophils.

134. The method of claim 133, wherein the cell is selected from a group consisting of colony-forming unit granulocyte-macrophage, colony-forming unit granulocyte erythrocyte macrophage megakaryocyte, and burst-forming unit erythroid cells.

135. The method of claim 121, wherein the IL-8-mediated activity comprises cell expansion, cell mobilization, or a combination thereof.

136. A method of increasing the number of hematopoietic cells circulating in the blood of a subject, wherein the method comprises administering an effective amount of a composition comprising an IL-8 mimetic selected from a group consisting of SEQ ID NO:36, variant a182, conservatively modified variants thereof, and prodrugs and codrugs thereof, wherein the IL-8 mimetic has the following structure:
(SEQ ID NO:36)
R_{N}-Ser-Ala-Lys-Glu-Leu-Arg-Xaa₁-Gln-Xaa₂-Ile-Xaa₄-
Thr-Tyr-Ser-Lys-[linker]-Asn-Trp-Val-Gln-Arg-Val-
Val-Glu-Lys-Phe-Leu-Lys-Arg-Ala-Glu-Asn-R_{C};
wherein,
Xaa₁, Xaa₂, and Xaa₄ are each independently selected from a group consisting of (a) any natural amino acid; and (b) any non-natural amino acid having the structure H₂N—R_{L}—COOH, where R_{L} is selected from a group consisting of saturated and unsaturated aliphatics and heteroaliphatics consisting of 20 or fewer carbon atoms, cycloalkyl amines, and fused cycloalkyl amines;
R_{N} is an N-terminal modifier comprising a component selected from a group consisting of a hydrogen, a poly(ethylene glycol) or derivative thereof, a diagnostic label, an acyl group, an acetyl group, and an N-terminal modifier capable of reducing the ability of the IL-8 mimetic to act as a substrate for aminopeptidases;
R_{C} is a C-terminal modifier comprising a component selected from a group consisting of a hydroxyl group, an amido group, an amino group, a poly(ethylene glycol) or derivative thereof, a diagnostic label, and a C-terminal modifier capable of reducing the ability of the IL-8 mimetic to act as a substrate for carboxypeptidases; and,
the linker is selected from a group consisting of (a) any combination of four natural amino acids, and (b) any non-natural amino acid having the following structure: [chemical structure]
wherein, R_{L} is selected from a group consisting of saturated and unsaturated aliphatics and heteroaliphatics consisting of 20 or fewer carbon atoms that are optionally substituted with a hydroxyl, carboxyl, amino, amido, or imino group; or an aromatic group having from 5 to 7 members in the ring; and —(CH₂)ₙ—, wherein n is an integer ranging from 1 to 20.

137. The method of claim 136, wherein the linker comprises 11-aminoundecanoic acid.

138. The method of claim 136, wherein Xaa₁, Xaa₂, and Xaa₄ are each independently selected from a group consisting of Ala, Phe, Ser, Tyr, Arg, His, and Trp.

139. The method of claim 136, wherein the Lys¹⁵ residue is replaced with an Arg¹⁵ residue.

140. The method of claim 136, wherein the IL-8 mimetic is selected from a group consisting of SEQ ID NOs:1645-1647, 1649, 1652-1659, 1661; variants a312-314, a316, a319-326, and a328; and conservatively modified variants thereof.

141. The method of claim 136, wherein the IL-8 mimetic consists of SEQ ID NO:1647, variant a314, conservatively modified variants thereof, and prodrugs and codrugs thereof, wherein the IL8 mimetic has the following structure:
(SEQ ID NO: 1647)
H-Ser-Ala-Lys-Glu-Leu-Arg-Ala-Gln-Phe-Ile-Lys-Thr-
Tyr-Ser-Lys-[11-aminoundecanoic acid]-Asn-Trp-Val-
Gln-Arg-Val-Val-Glu-Lys-Phe-Leu-Lys-Arg-Ala-Glu-
Asn-NH₂;

142. The method of claim 136, wherein R_{N} or R_{C} comprise a glycosaminoglycan, poly(ethylene glycol), or a derivative thereof, each having a molecular weight of less than about 20,000 Daltons.

143. The method of claim 136, wherein the IL-8 mimetic consists of SEQ ID NO:109, variant a254, conservatively modified variants thereof, and prodrugs and codrugs thereof, wherein the IL-8 mimetic has the following structure:
(SEQ ID NO: 109)
R_{N}-Ser-Ala-Lys-Glu-Leu-Arg-Xaa₁-Gln-Xaa₂-Ile-Xaa₄-
Thr-Tyr-Ser-Lys¹⁵-[linker]-Asn-Trp-Val-Gln-Arg-
Val-Val-Glu-Lys-Phe-Leu-Lys-Arg-Ala-Glu-Asn-R_{C};
wherein, the C-terminal region is cyclized at the underlined residues.

144. The method of claim 143, wherein the Lys¹⁵ residue is replaced with an Arg¹⁵ residue.

145. The method of claim 143, wherein the IL-8 mimetic is selected from a group consisting of SEQ ID NOs:1663-1668, and 1670-1675; variants a330-335, and a337-342; and conservatively modified variants thereof.

146. The method of claim 143, wherein the IL-8 mimetic is selected from a group consisting of SEQ ID NOs:1663-1665, and 1670-1674; variants a330-332, and a337-341; and conservatively modified variants thereof.

147. The method of claim 136, wherein the hematopoietic cell is selected from a group consisting of hematopoietic stem cells, hematopoietic progenitor cells, primitive granulocytes, primitive erythroid cells, leukocytes, and neutrophils.

148. The method of claim 147, wherein the hematopoietic cell is selected from a group consisting of colony-forming unit granulocyte-macrophage, colony-forming unit granulocyte erythrocyte macrophage megakaryocyte, and burst-forming unit erythroid cells.

149. The method of claim 136, wherein the administering increases the hemocrit in the subject.

150. The method of claim 136, wherein the administering assists in mobilizing and recovering hematopoietic stem cells and progenitor cells.

151. A method of producing antibodies that inhibit an activity of IL-8 comprising administering an effective amount the IL-8 mimetic of claim 101 or 108 to a subject, wherein the IL-8 mimetic serves as an antigen in the production of antibodies against the IL-8 mimetic.

152. The method of claim 151, wherein the antibodies are monoclonal antibodies.

153. The method of claim 151, wherein the method comprises formulating a vaccine.

154. A method of treating a hematological disorder, wherein the method comprises administering an effective amount of a composition comprising an IL-8 mimetic selected from a group consisting of SEQ ID NO:36, variant a182, conservatively modified variants thereof, and prodrugs and codrugs thereof, wherein the IL-8 mimetic has the following structure:
(SEQ ID NO:36)
R_{N}-Ser-Ala-Lys-Glu-Leu-Arg-Xaa₁-Gln-Xaa₂-Ile-Xaa₄-
Thr-Tyr-Ser-Lys-[linker]-Asn-Trp-Val-Gln-Arg-Val-
Val-Glu-Lys-Phe-Leu-Lys-Arg-Ala-Glu-Asn-R_{C};
wherein,
Xaa₁, Xaa₂, and Xaa₄ are each independently selected from a group consisting of (a) any natural amino acid; and (b) any non-natural amino acid having the structure H₂N—R_{L}—COOH, where R_{L} is selected from a group consisting of saturated and unsaturated aliphatics and heteroaliphatics consisting of 20 or fewer carbon atoms, cycloalkyl amines, and fused cycloalkyl amines;
R_{N} is an N-terminal modifier comprising a component selected from a group consisting of a hydrogen, a poly(ethylene glycol) or derivative thereof, a diagnostic label, an acyl group, an acetyl group, and an N-terminal modifier capable of reducing the ability of the IL-8 mimetic to act as a substrate for aminopeptidases;
R_{C} is a C-terminal modifier comprising a component selected from a group consisting of a hydroxyl group, an amido group, an amino group, a poly(ethylene glycol) or derivative thereof, a diagnostic label, and a C-terminal modifier capable of reducing the ability of the IL-8 mimetic to act as a substrate for carboxypeptidases; and,
the linker is selected from a group consisting of (a) any combination of four natural amino acids, and (b) any non-natural amino acid having the following structure: [chemical structure]
wherein, R_{L} is selected from a group consisting of saturated and unsaturated aliphatics and heteroaliphatics consisting of 20 or fewer carbon atoms that are optionally substituted with a hydroxyl, carboxyl, amino, amido, or imino group; or an aromatic group having from 5 to 7 members in the ring; and —(CH₂)ₙ—, wherein n is an integer ranging from 1 to 20.

155. The method of claim 154, wherein the linker comprises 11-aminoundecanoic acid.

156. The method of claim 154, wherein Xaa₁, Xaa₂, and Xaa₄ are each independently selected from a group consisting of Ala, Phe, Ser, Tyr, Arg, His, and Trp.

157. The method of claim 154, wherein the Lys¹⁵ residue is replaced with an Arg¹⁵ residue.

158. The method of claim 154, wherein the IL-8 mimetic is selected from a group consisting of SEQ ID NOs:1645-1647, 1649, 1652-1659, 1661; variants a312-314, a316, a319-326, and a328; and conservatively modified variants thereof.

159. The method of claim 154, wherein the IL-8 mimetic consists of SEQ ID NO:1647, variant a314, conservatively modified variants thereof, and prodrugs and codrugs thereof, wherein the IL8 mimetic has the following structure:
(SEQ ID NO:1647)
H-Ser-Ala-Lys-Glu-Leu-Arg-Ala-Gln-Phe-Ile-Lys-Thr-
Tyr-Ser-Lys-[11-aminoundecanoic acid]-Asn-Trp-Val-
Gln-Arg-Val-Val-Glu-Lys-Phe-Leu-Lys-Arg-Ala-Glu-
Asn-NH₂;

160. The method of claim 154, wherein R_{N} or R_{C} comprise a glycosaminoglycan, poly(ethylene glycol), or a derivative thereof, each having a molecular weight of less than about 20,000 Daltons.

161. The method of claim 154, wherein the IL-8 mimetic consists of SEQ ID NO:109, variant a254, conservatively modified variants thereof, and prodrugs and codrugs thereof, wherein the IL-8 mimetic has the following structure:
(SEQ ID NO: 109)
R_{N}-Ser-Ala-Lys-Glu-Leu-Arg-Xaa₁-Gln-Xaa₂-Ile-Xaa₄-
Thr-Tyr-Ser-Lys¹⁵-[linker]-Asn-Trp-Val-Gln-Arg-
Val-Val-Glu-Lys-Phe-Leu-Lys-Arg-Ala-Glu-Asn-R_{C};
wherein, the C-terminal region is cyclized at the underlined residues.

162. The method of claim 161, wherein the Lys¹⁵ residue is replaced with an Arg¹⁵ residue.

163. The method of claim 161, wherein the IL-8 mimetic is selected from a group consisting of SEQ ID NOs:1663-1668, and 1670-1675; variants a330-335, and a337-342; and conservatively modified variants thereof.

164. The method of claim 161, wherein the IL-8 mimetic is selected from a group consisting of SEQ ID NOs:1663-1665, and 1670-1674; variants a330-332, and a337-341; and conservatively modified variants thereof.

165. The method of claim 161, wherein the hematopoietic cell is selected from a group consisting of hematopoietic stem cells, hematopoietic progenitor cells, primitive granulocytes, primitive erythroid cells, leukocytes, and neutrophils.

166. The method of claim 165, wherein the hematopoietic cell is selected from a group consisting of colony-forming unit granulocyte-macrophage, colony-forming unit granulocyte erythrocyte macrophage megakaryocyte, and burst-forming unit erythroid cells.

167. The method of claim 154 or 161, wherein the hematological disorder comprises a disorder selected from a group consisting of bone marrow depression, aplastic anemia, agranulocytosis, leucopenia, pancytopenia, thrombocytopenia, macrocytic anemia, and megaloblastic anemia.

168. The method of claim 154 or 161, wherein the hematological disorder comprises a hematological stem cell disorder.

169. The method of claim 154 or 161, wherein the hematological disorder comprises myelodysplastic syndrome.

170. An article of manufacture comprising:
a first composition comprising a first IL-8 mimetic;
instructions for administering the first composition to a subject and monitoring the subject.

171. The article of manufacture of claim 170, wherein the first composition comprises a second agent.

172. The article of manufacture of claim 171, wherein the second agent comprises a glycosaminoglycan, a phospholipid, or a poly(alkylene glycol), or a combination thereof.

173. The article of manufacture of claim 171, wherein the second agent comprises heparin, phosphatidylcholine, poly(ethylene glycol) or a derivative thereof, or a combination thereof.

174. The article of manufacture of claim 171, wherein the second agent comprises a second IL-8 mimetic or is a codrug of the first IL-8 mimetic.

175. The article of manufacture of claim 170 further comprising a second composition comprising a second agent for administering in combination with the first IL-8 mimetic, wherein the instructions further comprise instructions on administering the second composition and monitoring the subject.
